United States Patent Application Publication US 2026/0375154 A1, published November 26, 2026 (application 19/489,729).

The application's sequence listing, which the Patent Office published only in electronic form, follows.

SEQUENCE LISTING (884 sequences)

SEQ ID NO: 1 - protein, 440 aa, Solanum tuberosum
ATLRVLMFPWLAYGHISPFLNIAKQLADRGFLIYLCSTLINLESIIKKIPEKYSESIRFVELHLPELPELPPHYHTTNGLPPHLNHTLHKALKMSKPNFSKILQNLKPDLVIYDILQPWAEHVVNEQNIPAVKILTSGAALFSYFFNFLKNPGVEFPFPAIYLPKVEQVKMREMFEKEPNEEDRLAEGNMQIMLMCTSRTIEAKYLDYCTELSNWKVVPVGPPFQDPITNDVDDMELIDWLGTKDENSTVFVCFGSEYFLSREDMEEVAFGLELSNVNFIWVARFPKGEEQNLEDVLPKGFLERIGERGRVLDKFAPQPRILNHPSTGGFISHCGWNSVMESLDFGVPIIAMPMHNDQPINAKLIVELGVAMEIVRDDDGNIHRGEITETLKDVITGETGEILRGKVRDISKNLKSIREEEMNAAAEELIQLCRNSNKYK

SEQ ID NO: 2 - protein, 808 aa, Arabidopsis thaliana
MANAERMITRVHSQRERLNETLVSERNEVLALLSRVEAKGKGILQQNQIIAEFEALPEQTRKKLEGGPFFDLLKSTQEAIVLPPWVALAVRPRPGVWEYLRVNLHALVVEELQPAEFLHFKEELVDGVKNGNFTLELDFEPFNASIPRPTLHKYIGNGVDFLNRHLSAKLFHDKESLLPLLKFLRLHSHQGKNLMLSEKIQNLNTLQHTLRKAEEYLAELKSETLYEEFEAKFEEIGLERGWGDNAERVLDMIRLLLDLLEAPDPCTLETFLGRVPMVFNVVILSPHGYFAQDNVLGYPDTGGQVVYILDQVRALEIEMLQRIKQQGLNIKPRILILTRLLPDAVGTTCGERLERVYDSEYCDILRVPFRTEKGIVRKWISRFEVWPYLETYTEDAAVELSKELNGKPDLIIGNYSDGNLVASLLAHKLGVTQCTIAHALEKTKYPDSDIYWKKLDDKYHFSCQFTADIFAMNHTDFIITSTFQEIAGSKETVGQYESHTAFTLPGLYRVVHGIDVFDPKFNIVSPGADMSIYFPYTEEKRRLTKFHSEIEELLYSDVENKEHLCVLKDKKKPILFTMARLDRVKNLSGLVEWYGKNTRLRELANLVVVGGDRRKESKDNEEKAEMKKMYDLIEEYKLNGQFRWISSQMDRVRNGELYRYICDTKGAFVQPALYEAFGLTVVEAMTCGLPTFATCKGGPAEIIVHGKSGFHIDPYHGDQAADTLADFFTKCKEDPSHWDEISKGGLQRIEEKYTWQIYSQRLLTLTGVYGFWKHVSNLDRLEARRYLEMFYALKYRPLAQAVPLAQDD

SEQ ID NO: 3 - protein, 806 aa, Coffea arabica
MAERVLTRVHSLRERLDATLAAHRNDVLLFMSRLETHGKGILKPHQLLAEFEEINKDGKQKIHDHAFEEVLKSTQEAIVLPPWVALAIRLRPGVWEYVRVNVHALVVEELTVPEYLHFKEELVDGSKNGNFVLELDFEPFTASFPKPTLTKYIGDGVEFLNRHLSAKMFHDKESMAPLLDFLRVHQYKGKTMMLNDRIKDLNTLQAVLRKAEEYLTTLSADTPYSEFEHKFQEIGLERGWGDTAERVLEMICMLLDLLGAPDSCTLEKFLGRIPMVFNVVILSPHGYFAQENVLGYPDTGGQVVYILDQVPALEREMLKRIKEQGLDVKPRILIITRLLPDAPGTTCGQRLEKVYGSEYSHILRVPFRTEKGVVRKWISRFEVWPYMETFTEDVAKEVTAELQAKPDLVIGNYSEGNLVASLLAHKLGVTQCTIAHALEKTKYPDSDIYLSKFDEKYHFSCQFTADLIAMNHTDFIITSTFQEIAGSKDTVGQYESHMAFTMPGLYRVVHGIDVFDPKFNIVSPGADTNLYFPHTEKEKRLTSFHPEIEELLFSDVENEEHLCVLKDKKKPILFTMARLDRVKNLTGLVELYAKNPKLRELVNLVVVGGDRRKESKDLEEQAEMKKMYSLIETYNLNGQFRWISSQMNRVRNGELYRYIADTRGAFVQPAFYEAFGLTVVEAMTCGLPTFATNHGGPAEIIIHGKSGFHIDPYHGEQVSELLANFFERCKKEPSYWDTISAGGLKRIQEKYTWQIYSDRLLTLAGVYGFWKCVSKLDRQEIRRYLEMFYALKYRKLAEAVPLAVDQ

SEQ ID NO: 4 - protein, 793 aa, Acidithiobacillus caldus
MIEALRQQLLDDPRSWYAFLRHLVASQRDSWLYTDLQRACADFREQLPEGYAEGIGPLEDFVAHTQEVIFRDPWMVFAWRPRPGRWIYVRIHREQLALEELSTDAYLQAKEGIVGLGAEGEAVLTVDFRDFRPVSRRLRDESTIGDGLTHLNRRLAGRIFSDLAAGRSQILEFLSLHRLDGQNLMLSNGNTDFDSLRQTVQYLGTLPRETPWAEIREDMRRRGFAPGWGNTAGRVRETMRLLMDLLDSPSPAALESFLDRIPMISRILIVSIHGWFAQDKVLGRPDTGGQVVYILDQARALEREMRNRLRQQGVDVEPRILIATRLIPESDGTTCDQRLEPVVGAENVQILRVPFRYPDGRIHPHWISRFKIWPWLERYAQDLEREVLAELGSRPDLIIGNYSDGNLVATLLSERLGVTQCNIAHALEKSKYLYSDLHWRDHEQDHHFACQFTADLIAMNAADIIVTSTYQEIAGNDREIGQYEGHQDYTLPGLYRVENGIDVFDSKFNIVSPGADPRFYFSYARTEERPSFLEPEIESLLFGREPGADRRGVLEDRQKPLLLSMARMDRIKNLSGLAELYGRSSRLRGLANLVIIGGHVDVGNSRDAEEREEIRRMHEIMDHYQLDGQLRWVGALLDKTVAGELYRVVADGRGVFVQPALFEAFGLTVIEAMSSGLPVFATRFGGPLEIIEDGVSGFHIDPNDHEATAERLADFLEAARERPKYWLEISDAALARVAERYTWERYAERLMTIARIFGFWRFVLDRESQVMERYLQMFRHLQWRPLAHAVPME

SEQ ID NO: 5 - protein, 794 aa, Nitrosomonas europaea
MTTIDTLATCTQQNRDAVYTLLRRYFTANRTLLLQSDLREGLLQTEQDCGQSDMLRAFVFRLQEGIFSSPWAYLALRPEIAKWEFMRIHQEHLIPEKLTISEFLKFKETVVKGEATESVLEVDFGPFNRGFPRLKESRSIGQGVIFLNRKLSSEMFSRIEAGHTSLLHFLGVHAIEGQQLMFSNNSHDIHAVRNQLRQALEMLETLDGTTPWIELAPKMNQLGFAPGWGHNANRVAETMNMLMDILEAPSPSALEEFLACIPMISRLLILSPHGYFGQDNVLGLPDTGGQVVYILDQVRALEKEMHDRLQLQGVQVEPKILIVTRLIPDAGDTTCNQRLEKVSGCTNTWILRVPFRKHNGEIIPHWISRFEIWPHLEIFAGDVEREALAELGGHPDLIIGNYSDGNLVATLLSRRLGVTQCNIAHALEKTKYLHSDIYWQENEDKYHFSCQYTADLLAMNSADFIVTSTYQEIAGTREAEGQYESYQAFSMPDLYRVIHGIDLFDPKFNIVSPGANADIYFPYSDPNRRLHSLIPEIESLIFDDATNLPARGYLQDPDKPLIFTMARLDRIKNITGLVELYAASPRLRSLANLVIVGGKIDPQHSSDHEEQEQIHRMHQLMDEHELDQQVRWLGMRLDKNLAGELYRYIADKRGIFVQPALFEAFGLTIIEAMASGLPTFATRYGGPLEIIQNNRSGFHIDPNQGAATADLIADFFEKNLENPQEWERISQGALDRVASRYTWKLYAERMMTLSRIYGFWKFVSGLEREETDRYLNMFYHLQFRPLANRLAHEI

SEQ ID NO: 6 - protein, 786 aa, Denitrovibrio acetiphilus
MNLSNKELEGLDEIISDHREDFCPFLGRIEEEDKQFFLSSEMKEMYAGDTVPDFIASLQEAVKMPGQIYFATRASIGEWAFVTVFTDTLDYMEVSPTEYQEAKEKTVLGENAAWMPSVDLKPFNRDFPKPSSADFIGKGVEFLNRHQSSRIFMNPEKGLKQLLDFLRVHKYDGRQLMLNNRIDSVDKLKKALKKAQALLKNKSDETEWEEVESDMAHLGFEPGWGKKLGYVKEFLALLSDILAAPEPVVLEKFLDRIPMIFSLVVLSPHGFFGQAGVFGKPDTGGQVVYILDQVKALEHELKSRLDEKGLDITPKILVVTRLIPEAEGTNCDMEEELIRGTDNCHIVRVPFRDESGEVVRQWISRFRIWPYLERFSTEAQNIILSKLQGNPDLIIGNYSDGNLVASLIAQRLGVTQCTIAHALEKTKYLYSDLYWQDNNDKYHFACQYTADLISMNYSDFIITSTYQEIAGTNDSVGQYESYMNYTLPGLYRVVNGIDVFDPKFNVVSPGAAPDIFFSYKSKDRFPEHIEEIESILFEDNLEGSRGSLADPDKPLIFTMARLDKIKNLTGLVRWFGENEELRKTANLLVIGGFVDESLSSDDEEREQIRIMHSVIDELGLDGSVRWVGAHLGKRMTGEFYRYVADRKGVFVQPALFEAFGLTIIEAMSSGLPVFATVYGGPSEIIEDGKSGFTLDPNKGDECAEKLLEFIQKCQSDPGHWIKISDNALKRVEERYNWPLYAKRLMTFARVYGFWKFVTNLEREETVRYLEMLYGMVYRRLADPKEY

SEQ ID NO: 7 - protein, 808 aa, unidentified
  source 1..808: note = Thermosynechococcus elongatus
MTCVLLKAVVESDERADLRQFSRILQLGEKRYLLRNDILDAFADYCRDQERPVPPPSESRLSKLVFYTQEIIVDNESLCWIVRPRIAQQEVCRLLVEDLTIVPMTIPELLDLRDRLVNHYHPNEGDVFEIDVQPFYDYSPIIRDAKNIGKGVEFLNRYLSSKLFQDPRQWQQNLFNFLRIHRYNGYQLLINERIRSPQHLSEQVKQALVVLSDRPPTEAYSEFRFELQNLGFEPGWGNTVARVRDTLEILDQLLDSPDHQVLEAFVSRIPMLFRIALISPHGWFGQEGVLGRPDTGGQVVYILDQVKSLEKQMREDLELAGLGVLEAQPKIIVLTRLIPNAEGTLCNQRLEKIYGTNDAWILRVPFREFNPKVTQNWISRFEIWPYLETFAIDAERELRAEFGHVPDLIIGNYSDGNLVAFLLARRLKVTQCNIAHALEKSKYLFSNLYWQDLEDKYHFSLQFTADLIAMNAANFIISSTYQEIVGTPDSIGQYESYQSFTMPDLYHVVNGIELFSPKFNVVPPGVNEQVYFPYYHYTERLEGDRQRLEELLFTLEDPQQIYGYLEAPEKRPLFSMARLDRIKNLTGLAEAFGRSKALQERCNLILVAGKLRTADSSDREEIAEIEKLYQIIHQYNLHGKIRWLGIRLPKADSGEIYRIIADRQGIFVQPALFEAFGLTILEAMISGLPTFGTRFGGPLEIIQDGVNGFYINPTHLEEMAETIVRFLEACDRDPQEWQRISKAGIERVYSTYTWKIHCTRLLSLAKIYGFWNFSSQENREDMMRYMEALFHLLYKPRAQALLAEHLQR

SEQ ID NO: 8 - protein, 816 aa, Oryza sativa
MGETTGERALTRLHSMRERIGDSLSAHTNELVAVFSRLVNQGKGMLQPHQIIAEYNAAIPEGEREKLKDSALEDVLRGAQEAIVIPPWIALAIRPRPGVWEYLRINVSQLGVEELSVPEYLQFKEQLVDGSTQNNFVLELDFEPFNASFPRPSLSKSIGNGVQFLNRHLSSKLFHDKESMYPLLNFLRAHNYKGMTMMLNDRIRSLDALQGALRKAEKHLAGITADTPYSEFHHRFQELGLEKGWGDCAQRVRETIHLLLDLLEAPEPSALEKFLGTIPMVFNVVILSPHGYFAQANVLGYPDTGGQVVYILDQVRAMENEMLLRIKQQGLNITPRILIVTRLLPDAHGTTCGQRLEKVLGTEHTHILRVPFRTENGTVRKWISRFEVWPYLETYTDDVAHEISGELQATPDLIIGNYSDGNLVACLLAHKLGVTHCTIAHALEKTKYPNSDLYWKKFEDHYHFSCQFTADLIAMNHADFIITSTFQEIAGNKETVGQYESHMAFTMPGLYRVVHGIDVFDPKFNIVSPGADMSIYFPFTESQKRLTSLHLEIEELLFSDVENTEHKFVLKDKKKPIIFSMARLDHVKNLTGLVELYGRNPRLQELVNLVVVCGDHGKESKDKEEQAEFKKMFNLIEQYNLNGHIRWISAQMNRVRNGELYRYICDMRGAFVQPALYEAFGLTVIEAMTCGLPTFATAYGGPAEIIVHGVSGYHIDPYQNDKASALLVEFFEKCQEDPNHWIKISQGGLQRIEEKYTWKLYSERLMTLSGVYGFWKYVTNLDRRETRRYLEMLYALKYRKMATTVPLAIEGEASTK

SEQ ID NO: 9 - protein, 808 aa, synthetic construct
MANAERMITRVHSQRERLNETLVSERNEVLALLSRIEQLGKGIYQQHQIIAEFEALPEQTEKKLLDGPFGDLLKSTQEAIVLPGWIALAVRPRPGVWEYLRVNVHALVVEELQPAEYLQFKEELVDGSTNGNFMLELDFEAFNASIPKPTLHKYIGNGVEFLNRHLSAKLFHDKESLLPLLEFLRLHSYQGKNLMLSEKIQNLNTLQHVLRKAEEYLATLPPETPYEEFEHKFQEIGLERGWGDNVERVLEMIRLLLDLLEAPDPCTLETFLGRIPMVFNVVILSPHGYFAQENVLGYPDTGGQVVYILDQVRALENEMLQRIKQQGLNIVPRILIITRLLPDAVGTTCGQRLERVYDSEYCHILRIPFRTEKGIVRKWISRFEVWPYLETFTEDVAKEISKELQGKPDLIIGNYSDGNLVASLLAHKLGVTQCTIAHALEKTKYPDSDIYWKKLDDKYHFSCQFTADLIAMNHADFIITSTFQEIAGSKDTVGQYESHIAFTLPGLYRVVHGIDVFDPKFNIVSPGADMSIYFPYTEEKRRLTKLHSEIEELLYSDVENKEHLGVLKDKKKPILFTMARLDRVKNLTGLVEWYARNPRLRELVNLVVVGGDRRKESKDNEEKAEMKKMYDLIEKYKLNGQFRWISAQMDRVRNGELYRYICDTKGAFVQPALYEAFGLTVVEAMTCGLPTFATCYGGPAEIIVHGKSGFHIDPYHGDQVAETLVEFFEKCKEDPSHWDEISKGALQRIEEKYTWQIYSQRLLTLTGVYGFWKYVTNLDRLEARRYLEMFYALKYRPLAQAVPLAQDD

SEQ ID NO: 10 - protein, 808 aa, synthetic construct
MANAERMITRVHSQRERLNETLVSERNEVLALLSRVEALGKGIYQQNQIIAEFEALPEQTEKKLLDGPFGDLLKSTQEAIVLPGWIALAVRPRPGVWEYLRVNIHALVVEELQPAEYLHFKEELVDGVTNGNFMLELDFEAFNASIPRPTLHKYIGNGVEFLNRHLSAKLFHDKESLLPLLEFLRLHSYQGKNLMLSEKIQNLNTLQHVLRKAEEYLATLPPETPYEEFEHKFQEIGLERGWGDNVERVLEMIRLLLDLLEAPDPCTLETFLGRIPMVFNVVILSPHGYFAQDNVLGYPDTGGQVVYILDQVRALENEMLQRIKQQGLNIVPRILIITRLLPDAVGTTCGQRLERVYDSEYCHILRVPFRTEKGIVRKWISRFEVWPYLETFTEDVAVELSKELNGKPDLIIGNYSDGNLVASLLAHKLGVTQCTIAHALEKTKYPDSDIYWKKLDDKYHFSCQFTADLIAMNHADFIITSTFQEIAGSKDTVGQYESHIAFTLPGLYRVVHGIDVFDPKFNIVSPGADMSIYFPYTEEKRRLTKLHSEIEELLYSDVENKEHLGVLKDKSKPILFTMARLDRVKNLTGLVEWYAKNPRLRELVNLVVVGGDRRKESKDNEEKAEMKKMYDLIEEYKLNGQFRWISAQMDRVRNGELYRYICDTKGAFVQPALYEAFGLTVVEAMTCGLPTFATCYGGPAEIIVHGKSGFHIDPYHGDQVADTLVDFFEKCKEDPSHWDEISKGALQRIEEKYTWQIYSQRLLTLTGVYGFWKYVSNLDRLEARRYLEMFYALKYRPLAQAVPLAQDD

SEQ ID NO: 11 - protein, 808 aa, synthetic construct
MANAERMITRVHSQRERLNETLVSERNEVLALLSRVERLGKGILQQNQIIAEFEALPEQTRKKLLGGPFGDLLKSTQEAIVLPGWVALAVRPRPGVWEYLRVNIHALVVEELQPAEYLHFKEELVDGVTNGNFMLELDFEAFNASIPKPTLHKYIGNGVEFLNRHLSAKLFHDKESLLPLLEFLRLHSYQGKNLMLSEKIQNLNTLQHVLRKAEEYLAELPPETPYEEFEHKFEEIGLERGWGDNVERVLEMIRLLLDLLEAPDPCTLETFLGRIPMVFNVVILSPHGYFAQDNVLGYPDTGGQVVYILDQVRALENEMLQRIKQQGLNIVPRILILTRLLPDAVGTTCGQRLERVYDSEYCHILRVPFRTEKGIVRKWISRFEVWPYLETYTEDVAVELSKELNGKPDLIIGNYSDGNLVASLLAHKLGVTQCTIAHALEKTKYPDSDIYWKKLDDKYHFSCQFTADLIAMNHADFIITSTFQEIAGSKETVGQYESHIAFTLPGLYRVVHGIDVFDPKFNIVSPGADMSIYFPYTEEKRRLTKLHSEIEELLYSDVENKEHLGVLKDKKKPILFTMARLDRVKNLTGLVEWYAKNPRLRELVNLVVVGGDRRKESKDNEEKAEMKKMYDLIEEYKLNGQFRWISAQMDRVRNGELYRYICDTKGAFVQPALYEAFGLTVVEAMTCGLPTFATCYGGPAEIIVHGKSGFHIDPYHGDQVADTLVEFFEKCKEDPSHWDEISKGALQRIEEKYTWQIYSQRLLTLTGVYGFWKYVSNLDRLEARRYLEMFYALKYRPLAQAVPLAQDD

SEQ ID NO: 12 - protein, 808 aa, synthetic construct
MANAERMITRVHSQRERLNETLVSERNEVLALLSRIEAKGKGILQQNQIIAEFEALPEQTRKKLLDGPFFDLLKSTQEAIVLPPWVALAVRPRPGVWEYLRVNLHDLVVEELQPAEFLHFKEELVDGVKNGNFTLELDFEAFNASIPRPTLHKYIGNGVDFLNRHLSAKLFHDKESLLPLLEFLRLHSHQGKNLMLSEKIQNLNTLQHVLRKAEEYLAELPPETLYEEFEAKFQEIGLERGWGDNAERVLDMIRLLLDLLEAPDPCTLETFLGRVPMVFNVVILSPHGYFAQDNVLGYPDTGGQVVYILDQVRALENEMLQRIKQQGLDIKPRILILTRLLPDAVGTTCGQRLERVYDTEYCHILRVPFRTEKGIVRKWISRFEVWPYLETFTEDAAKELSKELNGKPDLIIGNYSDGNLVASLLAHKLGVTQCTIAHALEKTKYPDSDIYWKKLDDKYHFSCQFTADLFAMNHADFIITSTFQEIAGSKDTVGQYESHTAFTLPGLYRVVHGIDVFDPKFNIVSPGADMSIYFPYTEEKRRLTKFHSEIEELLYSDVENKEHLGVLKDKSKPILFTMARLDRVKNLSGLVEWYGKNTRLRELVNLVVVGGDRRKESKDNEEKAEMKKMYDLIEEYKLNGQFRWISSQMDRVRNGELYRYICDTKGAFVQPALYEAFGLTVVEAMTCGLPTFATCKGGPAEIIVHGKSGFHIDPYHGDQAADTLADFFEKCKEDPSHWDEISKGALQRIEEKYTWQIYSQRLLTLTGVYGFWKHVSNLDRLEARRYLEMFYALKYRPLAQAVPLAQDD

SEQ ID NO: 13 - protein, 808 aa, synthetic construct
MANAERMITRVHSQRERLNETLVSERNEVLALLSRVEAKGKGILQQNQIIAEFEALPEQTRKKLLDGPFFDLLKSTQEAIVLPPWVALAVRPRPGVWEYLRVNLHALVVEELQPAEFLHFKEELVDGVKNGNFTLELDFEAFNASIPRPTLHKYIGNGVDFLNRHLSAKLFHDKESLLPLLEFLRLHSHQGKNLMLSEKIQNLNTLQHTLRKAEEYLAELPPETLYEEFEAKFEEIGLERGWGDNAERVLDMIRLLLDLLEAPDPCTLETFLGRVPMVFNVVILSPHGYFAQDNVLGYPDTGGQVVYILDQVRALENEMLQRIKQQGLNIKPRILILTRLLPDAVGTTCGQRLERVYDTEYCHILRVPFRTEKGIVRKWISRFEVWPYLETYTEDAAVELSKELNGKPDLIIGNYSDGNLVASLLAHKLGVTQCTIAHALEKTKYPDSDIYWKKLDDKYHFSCQFTADIFAMNHADFIITSTFQEIAGSKETVGQYESHTAFTLPGLYRVVHGIDVFDPKFNIVSPGADMSIYFPYTEEKRRLTKFHSEIEELLYSDVENKEHLGVLKDKKKPILFTMARLDRVKNLSGLVEWYGKNTRLRELVNLVVVGGDRRKESKDNEEKAEMKKMYDLIEEYKLNGQFRWISSQMDRVRNGELYRYICDTKGAFVQPALYEAFGLTVVEAMTCGLPTFATCKGGPAEIIVHGKSGFHIDPYHGDQAADTLADFFTKCKEDPSHWDEISKGGLQRIEEKYTWQIYSQRLLTLTGVYGFWKHVSNLDRLEARRYLEMFYALKYRPLAQAVPLAQDD

SEQ ID NO: 14 - protein, 808 aa, synthetic construct
MANAERMITRVHSQRERLNETLVSERNEVLALLSRIEAKGKGILQQNQLIAEFEALPEQTRKKLLDGPFAELLKSTQEAIVLPGWVALAVRPRPGVWEYLRVNLHALVVEELQPAEFLHFKEELVDGSTNDNFTLELDFEAFNASIPRPTLHKYIGNGVEFLNRHLSAKLFHDKESLLPLLEFLRLHSHQGKTLMLSDKIQNLNTLQHTLRKAEEYLSTLPPETPYEEFEHKFEEIGLERGWGDNAERVLEMIRLLLDLLEAPDPCTLETFLGRVPMVFNVVILSPHGYFAQDNVLGYPDTGGQVVYILDQVRALEEEMLKRIKQQGLNIKPRILILTRLLPDAVGTTCGQRLERVYDAEYCHILRVPFRTEKGIVRKWISRFEVWPYLETFTEDAAKELSKELQGKPDLIIGNYSDGNLVASLLAHKLGVTQCTIAHALEKTKYPDSDIYWKKLDDKYHFSCQFTADLFAMNHTDFIITSTFQEIAGSKDTVGQYESHTAFTLPGLYRVVHGIDVFDPKFNIVSPGADMSIYFPYTEEKRRLTKFHSEIEELLYSDVENKEHLCVLKDKSKPILFTMARLDRVKNLSGLVEWYGKNPRLRELVNLVVVGGDRRKESKDNEEKAEMKKMYDLIEKYKLNGQFRWISAQMDRVRNGELYRYICDTKGAFVQPALYEAFGLTVVEAMTCGLPTFATCKGGPAEIIVHGKSGFHIDPYHGDQAADLLADFFTKCKEDPSHWDKISKGGLKRIEEKYTWQIYSQRLLTLTGVYGFWKHVSNLDRREARRYLEMFYALKYRPLAQAVPLAQDD

SEQ ID NO: 15 - protein, 808 aa, synthetic construct
MANAERMITRVHSQRERLNETLVSERNEVLALLSRVEAKGKGILQQNQIIAEFEALPEQTRKKLLDGPFADLLKSTQEAIVLPGWVALAVRPRPGVWEYLRVNLHALVVEELQPAEFLHFKEELVDGSKNDNFTLELDFEAFNASIPRPTLHKYIGNGVEFLNRHLSAKLFHDKESLLPLLEFLRLHSHQGKTLMLSEKIQNLNTLQHTLRKAEEYLATLPPETPYEEFEHKFEEIGLERGWGDNAERVLEMIRLLLDLLEAPDPCTLETFLGRVPMVFNVVILSPHGYFAQDNVLGYPDTGGQVVYILDQVRALENEMLKRIKQQGLNIKPRILILTRLLPDAVGTTCGQRLERVYDSEYCHILRVPFRTEKGIVRKWISRFEVWPYLETFTEDAAKELSKELNGKPDLIIGNYSDGNLVASLLAHKLGVTQCTIAHALEKTKYPDSDIYWKKLDDKYHFSCQFTADIFAMNHTDFIITSTFQEIAGSKDTVGQYESHTAFTLPGLYRVVHGIDVFDPKFNIVSPGADMSIYFPYTEEKRRLTKFHSEIEELLYSDVENKEHLCVLKDKSKPILFTMARLDRVKNLSGLVEWYGKNPRLRELVNLVVVGGDRRKESKDNEEKAEMKKMYDLIEEYKLNGQFRWISAQMDRVRNGELYRYICDTKGAFVQPALYEAFGLTVVEAMTCGLPTFATCKGGPAEIIVHGKSGFHIDPYHGDQAADLLADFFTKCKEDPSHWDEISKGGLQRIEEKYTWQIYSQRLLTLTGVYGFWKHVSNLDRLEARRYLEMFYALKYRPLAQAVPLAQDD

SEQ ID NO: 16 - protein, 808 aa, synthetic construct
MANAERMITRVHSQRERLNETLVSERNEVLALLSRVEAKGKGILQQNQIIAEFEALPEQTRKKLLGGPFADLLKSTQEAIVLPGWVALAVRPRPGVWEYLRVNLHALVVEELQPAEFLHFKEELVDGVKNGNFTLELDFEAFNASIPRPTLHKYIGNGVDFLNRHLSAKLFHDKESLLPLLEFLRLHSHQGKNLMLSEKIQNLNTLQHTLRKAEEYLATLPPETPYEEFEHKFEEIGLERGWGDNAERVLEMIRLLLDLLEAPDPCTLETFLGRVPMVFNVVILSPHGYFAQDNVLGYPDTGGQVVYILDQVRALEEEMLQRIKQQGLNIKPRILILTRLLPDAVGTTCGQRLERVYDSEYCHILRVPFRTEKGIVRKWISRFEVWPYLETFTEDAAVELSKELNGKPDLIIGNYSDGNLVASLLAHKLGVTQCTIAHALEKTKYPDSDIYWKKLDDKYHFSCQFTADIFAMNHTDFIITSTFQEIAGSKDTVGQYESHTAFTLPGLYRVVHGIDVFDPKFNIVSPGADMSIYFPYTEEKRRLTKFHSEIEELLYSDVENKEHLCVLKDKSKPILFTMARLDRVKNLSGLVEWYGKNTRLRELVNLVVVGGDRRKESKDNEEKAEMKKMYDLIEEYKLNGQFRWISAQMDRVRNGELYRYICDTKGAFVQPALYEAFGLTVVEAMTCGLPTFATCKGGPAEIIVHGKSGFHIDPYHGDQAADLLADFFTKCKEDPSHWDEISKGGLQRIEEKYTWQIYSQRLLTLTGVYGFWKHVSNLDRLEARRYLEMFYALKYRPLAQAVPLAQDD

SEQ ID NO: 17 - protein, 808 aa, synthetic construct
MANAERMITRVHSQRERLNETLVSERNEVLALLSRVEAKGKGILQQNQIIAEFEALPEQTRKKLEGGPFFDLLKSTQEAIVLPGWVALAVRPRPGVWEYLRVNLHALVVEELQPAEFLHFKEELVDGVKNGNFTLELDFEAFNASIPRPTLHKYIGNGVDFLNRHLSAKLFHDKESLLPLLKFLRLHSHQGKNLMLSEKIQNLNTLQHTLRKAEEYLAELPPETPYEEFEHKFEEIGLERGWGDNAERVLEMIRLLLDLLEAPDPCTLETFLGRVPMVFNVVILSPHGYFAQDNVLGYPDTGGQVVYILDQVRALEIEMLQRIKQQGLNIKPRILILTRLLPDAVGTTCGQRLERVYDSEYCHILRVPFRTEKGIVRKWISRFEVWPYLETYTEDAAVELSKELNGKPDLIIGNYSDGNLVASLLAHKLGVTQCTIAHALEKTKYPDSDIYWKKLDDKYHFSCQFTADIFAMNHTDFIITSTFQEIAGSKETVGQYESHTAFTLPGLYRVVHGIDVFDPKFNIVSPGADMSIYFPYTEEKRRLTKFHSEIEELLYSDVENKEHLCVLKDKKKPILFTMARLDRVKNLSGLVEWYGKNTRLRELVNLVVVGGDRRKESKDNEEKAEMKKMYDLIEEYKLNGQFRWISAQMDRVRNGELYRYICDTKGAFVQPALYEAFGLTVVEAMTCGLPTFATCKGGPAEIIVHGKSGFHIDPYHGDQAADTLADFFTKCKEDPSHWDEISKGGLQRIEEKYTWQIYSQRLLTLTGVYGFWKHVSNLDRLEARRYLEMFYALKYRPLAQAVPLAQDD

SEQ ID NO: 18 - protein, 808 aa, synthetic construct
MANAERMITRVHSQRERLNETLVSERNEVLALLSRVETKGKGILQQNQIIAEFEALPEQGEKKLEGGPFFDLLKSTQEAIVLPGWVALAVRPRPGVWEYLRVNLHALVVEELQPAEFLHFKEELVDGSTNGNFTLELDFEAFNASIPRPTLHKYIGNGVEFLNRHLSAKLFHDKESLLPLLKFLRLHSYQGKTLMLSEKIQNLNTLQHVLRKAEEYLATLKPETLYEEFEHKFQEIGLERGWGDNAERVLDMIRLLLDLLEAPDPCTLETFLGRVPMVFNVVILSPHGYFAQDNVLGYPDTGGQVVYILDQVRALEIEMLKRIKQQGLNIKPRILILTRLLPDAVGTTCGQRLERVYDSEYCDILRVPFRTEKGIVRKWISRFEVWPYLETYTEDAAKELSKELNGKPDLIIGNYSDGNLVASLLAHKLGVTQCTIAHALEKTKYPDSDIYWKKLDDKYHFSCQFTADIFAMNHADFIITSTFQEIAGSKETVGQYESHTAFTLPGLYRVVHGIDVFDPKFNIVSPGADMSIYFPYTEEKRRLTKFHSEIEELLYSDVENKEYLGVLKDKSKPILFTMARLDRVKNLSGLVEWYGRNTRLRELVNLVVVGGDRRKESKDNEEKAEMKKMYDLIEEYKLNGQFRWISAQMDRVRNGELYRYICDTKGAFVQPALYEAFGLTVVEAMTCGLPTFATCKGGPAEIIVHGKSGFHIDPYHGDQAADTLADFFTKCKEDPSHWDEISKGALQRIEEKYTWQIYSQRLLTLTGVYGFWKHVSNLDRLEARRYLEMFYALKYRPLAQAVPLAQDD

SEQ ID NO: 19 - protein, 808 aa, synthetic construct
MANAERMITRVHSQRERLNETLVSERNEVLALLSRVEAKGKGILQQNQIIAEFEALPEQGEKKLEGGPFFDLLKSTQEAIVLPGWVALAVRPRPGVWEYLRVNLHALVVEELQPAEFLHFKEELVDGVSNGNFTLELDFEAFNASIPRPTLHKYIGNGVEFLNRHLSAKLFHDKESLLPLLKFLRLHSYQGKTLMLSEKIQNLNTLQHVLRKAEEYLATLKPETLYEEFEHKFQEIGLERGWGDNAERVLDMIRLLLDLLEAPDPCTLETFLGRVPMVFNVVILSPHGYFAQDNVLGYPDTGGQVVYILDQVRALEIEMLQRIKQQGLNIKPRILILTRLLPDAVGTTCGQRLERVYDSEYCDILRVPFRTEKGIVRKWISRFEVWPYLETYTEDAAVELSKELNGKPDLIIGNYSDGNLVASLLAHKLGVTQCTIAHALEKTKYPDSDIYWKKLDDKYHFSCQFTADIFAMNHADFIITSTFQEIAGSKETVGQYESHTAFTLPGLYRVVHGIDVFDPKFNIVSPGADMSIYFPYTEEKRRLTKFHSEIEELLYSDVENKEHLGVLKDKSKPILFTMARLDRVKNLSGLVEWYGKNTRLRELVNLVVVGGDRRKESKDNEEKAEMKKMYDLIEEYKLNGQFRWISAQMDRVRNGELYRYICDTKGAFVQPALYEAFGLTVVEAMTCGLPTFATCKGGPAEIIVHGKSGFHIDPYHGDQAADTLADFFTKCKEDPSHWDEISKGGLQRIEEKYTWQIYSQRLLTLTGVYGFWKHVSNLDRLEARRYLEMFYALKYRPLAQAVPLAQDD

SEQ ID NO: 20 - protein, 808 aa, synthetic construct
MANAERMITRVHSQRERLNETLVSERNEVLALLSRVEAKGKGILQQNQIIAEFEALPEQTRKKLEGGPFFDLLKSTQEAIVLPGWVALAVRPRPGVWEYLRVNLHALVVEELQPAEFLHFKEELVDGVSNGNFTLELDFEAFNASIPRPTLHKYIGNGVEFLNRHLSAKLFHDKESLLPLLKFLRLHSHQGKTLMLSEKIQNLNTLQHVLRKAEEYLAELKPETLYEEFEHKFEEIGLERGWGDNAERVLDMIRLLLDLLEAPDPCTLETFLGRVPMVFNVVILSPHGYFAQDNVLGYPDTGGQVVYILDQVRALEIEMLQRIKQQGLNIKPRILILTRLLPDAVGTTCGQRLERVYDSEYCDILRVPFRTEKGIVRKWISRFEVWPYLETYTEDAAVELSKELNGKPDLIIGNYSDGNLVASLLAHKLGVTQCTIAHALEKTKYPDSDIYWKKLDDKYHFSCQFTADIFAMNHADFIITSTFQEIAGSKETVGQYESHTAFTLPGLYRVVHGIDVFDPKFNIVSPGADMSIYFPYTEEKRRLTKFHSEIEELLYSDVENKEHLGVLKDKKKPILFTMARLDRVKNLSGLVEWYGKNTRLRELVNLVVVGGDRRKESKDNEEKAEMKKMYDLIEEYKLNGQFRWISAQMDRVRNGELYRYICDTKGAFVQPALYEAFGLTVVEAMTCGLPTFATCKGGPAEIIVHGKSGFHIDPYHGDQAADTLADFFTKCKEDPSHWDEISKGGLQRIEEKYTWQIYSQRLLTLTGVYGFWKHVSNLDRLEARRYLEMFYALKYRPLAQAVPLAQDD

SEQ ID NO: 21 - protein, 808 aa, synthetic construct
MANAERMITRVHSQRERLNETLVSERNEVLALLSRIEAKGKGILQQHQILAEYEALPEQGEKKLQDGPFADLLKSTQEAIVLPGWVALAVRPRPGVWEYLRVNLHDLVVEELQPAEFLHFKEELVDGSTNGNFTLELDFEAFNASIPRPTLHKYIGNGVEFLNRHLSAKLFHDKESLLPLLEFLRLHSHQGKNLMLSDKIQNLNTLQHVLRKAEEYLSTLPSETPYEEFEHKFQEIGLERGWGDNAERVLEMIRLLLDLLEAPDPCTLETFLGRVPMVFNVVILSPHGYFAQDNVLGYPDTGGQVVYILDQVRALENEMLKRIKQQGLDIKPRILILTRLLPDAVGTTCGERLERVYDSEYCHILRVPFRTEKGIVRKWISRFEVWPYLETYTEDAAVELSKELNGKPDLIIGNYSDGNLVASLLAHKLGVTQCTIAHALEKTKYPDSDIYWKKLDDKYHFSCQFTADIFAMNHADFIITSTFQEIAGSKDTVGQYESHTAFTLPGLYRVVHGIDVFDPKFNIVSPGADMSIYFPYTEEKRRLTKFHSEIEELLYSDVENKEHLGVLKDKTKPILFTMARLDRVKNLSGLVEWYGKNTRLRELVNLVVVGGDRRKESKDNEEKAEMKKMYDLIEKYKLNGQFRWISAQMDRVRNGELYRYICDTKGAFVQPALYEAFGLTVVEAMTCGLPTFATCKGGPAEIIVHGKSGFHIDPYHGDQAAEILADFFEKCKEDPSHWDKISKGALQRIYEKYTWQIYSQRLLTLTGVYGFWKYVSNLDRLEARRYLEMFYALKYRPLAQAVPLAQDD

SEQ ID NO: 22 - protein, 808 aa, synthetic construct
MANAERMITRVHSQRERLNETLVSERNEVLALLSRVEAKGKGILQQNQIIAEFEALPEQTRKKLEGGPFADLLKSTQEAIVLPGWVALAVRPRPGVWEYLRVNLHALVVEELQPAEFLHFKEELVDGVTNGNFTLELDFEAFNASIPRPTLHKYIGNGVEFLNRHLSAKLFHDKESLLPLLEFLRLHSHQGKNLMLSEKIQNLNTLQHVLRKAEEYLAELPSETPYEEFEHKFEEIGLERGWGDNAERVLDMIRLLLDLLEAPDPCTLETFLGRVPMVFNVVILSPHGYFAQDNVLGYPDTGGQVVYILDQVRALEIEMLQRIKQQGLNIKPRILILTRLLPDAVGTTCGERLERVYDSEYCHILRVPFRTEKGIVRKWISRFEVWPYLETYTEDAAVELSKELNGKPDLIIGNYSDGNLVASLLAHKLGVTQCTIAHALEKTKYPDSDIYWKKLDDKYHFSCQFTADIFAMNHADFIITSTFQEIAGSKETVGQYESHTAFTLPGLYRVVHGIDVFDPKFNIVSPGADMSIYFPYTEEKRRLTKFHSEIEELLYSDVENKEHLGVLKDKKKPILFTMARLDRVKNLSGLVEWYGKNTRLRELVNLVVVGGDRRKESKDNEEKAEMKKMYDLIEEYKLNGQFRWISAQMDRVRNGELYRYICDTKGAFVQPALYEAFGLTVVEAMTCGLPTFATCKGGPAEIIVHGKSGFHIDPYHGDQAADLLADFFTKCKEDPSHWDEISKGGLQRIEEKYTWQIYSQRLLTLTGVYGFWKHVSNLDRLEARRYLEMFYALKYRPLAQAVPLAQDD

SEQ ID NO: 23 - protein, 808 aa, synthetic construct
MANAERMITRVHSQRERLNETLVSERNEVLALLSRIEQKGKGILQQHQIIAEFEALPEQTRKKLLGGPFFDLLKSTQEAIVLPGWVALAVRPRPGVWEYLRVNVHALVVEELQPAEFLHFKEELVDGVTNGNFILELDFEPFNASIPRPTLHKYIGNGVEFLNRHLSAKLFHDKESLLPLLEFLRLHSHQGKNLMLSEKIQNLNTLQHVLRKAEEYLATLPPETPYEEFEHKFQEIGLERGWGDNAERVLDMIRLLLDLLEAPDPCTLETFLGRVPMVFNVVILSPHGYFAQDNVLGYPDTGGQVVYILDQVRALENEMLKRIKQQGLDIKPRILILTRLLPDAVGTTCGQRLERVYDSEYCDILRVPFRTEKGIVRKWISRFEVWPYLETFTEDAAKELSKELQGKPDLIIGNYSDGNLVASLLAHKLGVTQCTIAHALEKTKYPDSDIYWKKLDDKYHFSCQFTADIFAMNHADFIITSTFQEIAGSKDTVGQYESHTAFTLPGLYRVVHGIDVFDPKFNIVSPGADMSIYFPYTEEKRRLTSFHSEIEELLYSDVENKEHLGVLKDKKKPILFTMARLDRVKNLSGLVEWYGKNTRLRELANLVVVGGDRRKESKDLEEKAEMKKMYDLIEKYKLNGQFRWISAQMDRVRNGELYRYICDTKGAFVQPALYEAFGLTVVEAMTCGLPTFATCYGGPAEIIVHGKSGFHIDPYHGDQAAETLADFFTKCKEDPSHWDKISKGALQRIEEKYTWQIYSQRLLTLTGVYSFWKHVSNLDRLEARRYLEMFYALKYRPLAQAVPLAQDD

SEQ ID NO: 24 - protein, 808 aa, synthetic construct
MANAERMITRVHSQRERLNETLVSERNEVLALLSRIEQKGKGILQQNQIIAEFEALPEQTRKKLLGGPFFDLLKSTQEAIVLPGWVALAVRPRPGVWEYLRVNVHALVVEELQPAEFLHFKEELVDGVTNGNFILELDFEPFNASIPRPTLHKYIGNGVEFLNRHLSAKLFHDKESLLPLLEFLRLHSHQGKNLMLSEKIQNLNTLQHVLRKAEEYLATLPPETPYEEFEHKFQEIGLERGWGDNAERVLDMIRLLLDLLEAPDPCTLETFLGRVPMVFNVVILSPHGYFAQDNVLGYPDTGGQVVYILDQVRALENEMLKRIKQQGLDIKPRILILTRLLPDAVGTTCGQRLERVYDSEYCDILRVPFRTEKGIVRKWISRFEVWPYLETFTEDAAKELSKELNGKPDLIIGNYSDGNLVASLLAHKLGVTQCTIAHALEKTKYPDSDIYWKKLDDKYHFSCQFTADIFAMNHADFIITSTFQEIAGSKDTVGQYESHTAFTLPGLYRVVHGIDVFDPKFNIVSPGADMSIYFPYTEEKRRLTKFHSEIEELLYSDVENKEHLGVLKDKKKPILFTMARLDRVKNLSGLVEWYGKNTRLRELANLVVVGGDRRKESKDNEEKAEMKKMYDLIEEYKLNGQFRWISAQMDRVRNGELYRYICDTKGAFVQPALYEAFGLTVVEAMTCGLPTFATCYGGPAEIIVHGKSGFHIDPYHGDQAAETLADFFTKCKEDPSHWDKISKGALQRIEEKYTWQIYSQRLLTLTGVYSFWKHVSNLDRLEARRYLEMFYALKYRPLAQAVPLAQDD

SEQ ID NO: 25 - protein, 808 aa, synthetic construct
MANAERMITRVHSQRERLNETLVSERNEVLALLSRVEAKGKGILQQNQIIAEFEALPEQTRKKLLGGPFFDLLKSTQEAIVLPGWVALAVRPRPGVWEYLRVNLHALVVEELQPAEFLHFKEELVDGVTNGNFILELDFEPFNASIPRPTLHKYIGNGVEFLNRHLSAKLFHDKESLLPLLEFLRLHSHQGKNLMLSEKIQNLNTLQHVLRKAEEYLATLPPETPYEEFEHKFQEIGLERGWGDNAERVLDMIRLLLDLLEAPDPCTLETFLGRVPMVFNVVILSPHGYFAQDNVLGYPDTGGQVVYILDQVRALEIEMLQRIKQQGLNIKPRILILTRLLPDAVGTTCGQRLERVYDSEYCDILRVPFRTEKGIVRKWISRFEVWPYLETYTEDAAVELSKELNGKPDLIIGNYSDGNLVASLLAHKLGVTQCTIAHALEKTKYPDSDIYWKKLDDKYHFSCQFTADIFAMNHADFIITSTFQEIAGSKDTVGQYESHTAFTLPGLYRVVHGIDVFDPKFNIVSPGADMSIYFPYTEEKRRLTKFHSEIEELLYSDVENKEHLGVLKDKKKPILFTMARLDRVKNLSGLVEWYGKNTRLRELANLVVVGGDRRKESKDNEEKAEMKKMYDLIEEYKLNGQFRWISAQMDRVRNGELYRYICDTKGAFVQPALYEAFGLTVVEAMTCGLPTFATCKGGPAEIIVHGKSGFHIDPYHGDQAADTLADFFTKCKEDPSHWDEISKGGLQRIEEKYTWQIYSQRLLTLTGVYSFWKHVSNLDRLEARRYLEMFYALKYRPLAQAVPLAQDD

SEQ ID NO: 26 - protein, 808 aa, synthetic construct
MANAERMITRVHSQRERLNETLVSERNEVLALLSRVEAKGKGILQQNQIIAEFEALPEQTRKKLEGGPFFDLLKSTQEAIVLPGWVALAVRPRPGVWEYLRVNLHALVVEELQPAEFLHFKEELVDGVTNGNFTLELDFEPFNASIPRPTLHKYIGNGVEFLNRHLSAKLFHDKESLLPLLKFLRLHSHQGKNLMLSEKIQNLNTLQHTLRKAEEYLAELPPETPYEEFEHKFEEIGLERGWGDNAERVLDMIRLLLDLLEAPDPCTLETFLGRVPMVFNVVILSPHGYFAQDNVLGYPDTGGQVVYILDQVRALEIEMLQRIKQQGLNIKPRILILTRLLPDAVGTTCGQRLERVYDSEYCDILRVPFRTEKGIVRKWISRFEVWPYLETYTEDAAVELSKELNGKPDLIIGNYSDGNLVASLLAHKLGVTQCTIAHALEKTKYPDSDIYWKKLDDKYHFSCQFTADIFAMNHADFIITSTFQEIAGSKETVGQYESHTAFTLPGLYRVVHGIDVFDPKFNIVSPGADMSIYFPYTEEKRRLTKFHSEIEELLYSDVENKEHLGVLKDKKKPILFTMARLDRVKNLSGLVEWYGKNTRLRELANLVVVGGDRRKESKDNEEKAEMKKMYDLIEEYKLNGQFRWISAQMDRVRNGELYRYICDTKGAFVQPALYEAFGLTVVEAMTCGLPTFATCKGGPAEIIVHGKSGFHIDPYHGDQAADTLADFFTKCKEDPSHWDEISKGGLQRIEEKYTWQIYSQRLLTLTGVYSFWKHVSNLDRLEARRYLEMFYALKYRPLAQAVPLAQDD

SEQ ID NO: 27 - protein, 808 aa, synthetic construct
MANAERMITRVHSQRERLNETLVSERNEVLALLSRIEAKGKGILQQHQLIAEFEALPKQTEKKLLGGPFYDLLKSTQEAIVLPPWVALAVRPRPGVWEYLRVHLHALVVEELQPAEFLHFKEELVDGSSNGNFTLELDFEPFNASIPRPTLHKYIGNGVEFLNRHLSAKLFHDKESLYPLLEFLRLHCHQGKTLMLSDKIQNLNTLQHVLRKAEEYLSTLPPETPYEEFEHKFQEIGLERGWGDNAERVLEMIRLLLDLLEAPDPCTLEKFLGRVPMVFNVVILSPHGYFAQDNVLGYPDTGGQVVYILDQVRALENEMLKRIKQQGLDIKPRILILTRLLPDAVGTTCGQRLERVYDSEYCHILRVPFRTEKGIVRKWISRFEVWPYLETYTEDAANELAKELQGKPDLIIGNYSDGNLVASLLAHKLGVTQCTIAHALEKTKYPDSDIYWKKLDDKYHFSCQFTADLFAMNHTDFIITSTFQEIAGSKDTVGQYESHTAFTLPGLYRVVHGIDVFDPKFNIVSPGADMSIYFPYTEEKRRLTSFHPEIEELLYSDVENKEHLCVLKDKNKPILFTMARLDRVKNLSGLVEWYGKNTRLRELANLVVVGGDRRKESKDNEEQAEMKKMYDLIEKYKLNGHFRWISSQMNRVRNGELYRYICDTKGAFVQPALYEAFGLTVVEAMTCGLPTFATCYGGPAEIIVHGKSGFHIDPYHGDQAAELLADFFEKCKEDPSHWDEISQGGLQRIEEKYTWQIYSQRLLTLTGVYGFWKHVSNLDRREARRYLEMFYALKYRPLAQAVPLAQDD

SEQ ID NO: 28 - protein, 808 aa, synthetic construct
MANAERMITRVHSQRERLNETLVSERNEVLALLSRVEAKGKGILQQHQIIAEFEALPEQTRKKLLGGPFFDLLKSTQEAIVLPPWVALAVRPRPGVWEYLRVNLHALVVEELQPAEFLHFKEELVDGVSNGNFTLELDFEPFNASIPRPTLHKYIGNGVEFLNRHLSAKLFHDKESLYPLLKFLRLHCHQGKTLMLSDKIQNLNTLQHTLRKAEEYLATLPPETPYEEFEHKFQEIGLERGWGDNAERVLEMIRLLLDLLEAPDPCTLETFLGRVPMVFNVVILSPHGYFAQDNVLGYPDTGGQVVYILDQVRALENEMLQRIKQQGLDIKPRILILTRLLPDAVGTTCGQRLERVYDSEYCHILRVPFRTEKGIVRKWISRFEVWPYLETYTEDAANELSKELQGKPDLIIGNYSDGNLVASLLAHKLGVTQCTIAHALEKTKYPDSDIYWKKLDDKYHFSCQFTADLFAMNHTDFIITSTFQEIAGSKDTVGQYESHTAFTLPGLYRVVHGIDVFDPKFNIVSPGADMSIYFPYTEEKRRLTKFHPEIEELLYSDVENKEHLCVLKDKNKPILFTMARLDRVKNLSGLVEWYGKNTRLRELANLVVVGGDRRKESKDNEEKAEMKKMYDLIEEYKLNGQFRWISSQMNRVRNGELYRYICDTKGAFVQPALYEAFGLTVVEAMTCGLPTFATCHGGPAEIIVHGKSGFHIDPYHGDQAADLLADFFTKCKEDPSHWDEISKGGLQRIEEKYTWQIYSQRLLTLTGVYGFWKHVSNLDRLEARRYLEMFYALKYRPLAQAVPLAQDD

SEQ ID NO: 29 - protein, 808 aa, synthetic construct
MANAERMITRVHSQRERLNETLVSERNEVLALLSRIEAKGKGILQQHQIIAEFEALPEQTRKKLLGGPFFDLLKSTQEAIVLPPWVALAVRPRPGVWEYLRVHLHALVVEELQPAEFLHFKEELVDGSKNGNFTLELDFEPFNASIPRPTLHKYIGNGVDFLNRHLSAKLFHDKESLYPLLEFLRLHCHRGKTLMLSDKIQNLNTLQHVLRKAEEYLSELPPETPYEEFEAKFQEIGLERGWGDNAERVLEMIRLLLDLLEAPDPCTLEKFLGRVPMVFNVVILSPHGYFAQDNVLGYPDTGGQVVYILDQVRALENEMLQRIKQQGLDIKPRILILTRLLPDAVGTTCGQRLERVYDSEYCHILRVPFRTEKGIVRKWISRFEVWPYLETYTEDAANELAKELQGKPDLIIGNYSDGNLVASLLAHKLGVTQCTIAHALEKTKYPDSDIYWKKLDDKYHFSCQFTADLFAMNHTDFIITSTFQEIAGSKDTVGQYESHTAFTLPGLYRVVHGIDVFDPKFNIVSPGADMSIYFPYTEEKRRLTKFHPEIEELLYSDVENKEHLCVLKDKNKPILFTMARLDRVKNLSGLVEWYGKNPRLRELANLVVVGGDRRKESKDNEEQAEMKKMYDLIEEYKLNGHFRWISSQMDRVRNGELYRYICDTKGAFVQPALYEAFGLTVVEAMTCGLPTFATCKGGPAEIIVHGKSGFHIDPYHGDQAAELLADFFEKCKEDPSHWDEISKGGLQRIEEKYTWQIYSQRLLTLTGVYGFWKHVSNLDRLEARRYLEMFYALKYRPLAQAVPLAQDD

SEQ ID NO: 30 - protein, 808 aa, synthetic construct
MANAERMITRVHSQRERLNETLVSERNEVLALLSRVEAKGKGILQQNQIIAEFEALPEQTRKKLLGGPFFDLLKSTQEAIVLPPWVALAVRPRPGVWEYLRVNLHALVVEELQPAEFLHFKEELVDGVKNGNFTLELDFEPFNASIPRPTLHKYIGNGVDFLNRHLSAKLFHDKESLYPLLKFLRLHSHQGKTLMLSDKIQNLNTLQHTLRKAEEYLAELPSETPYEEFEAKFQEIGLERGWGDNAERVLDMIRLLLDLLEAPDPCTLETFLGRVPMVFNVVILSPHGYFAQDNVLGYPDTGGQVVYILDQVRALENEMLQRIKQQGLNIKPRILILTRLLPDAVGTTCGQRLERVYDSEYCHILRVPFRTEKGIVRKWISRFEVWPYLETYTEDAAVELSKELQGKPDLIIGNYSDGNLVASLLAHKLGVTQCTIAHALEKTKYPDSDIYWKKLDDKYHFSCQFTADLFAMNHTDFIITSTFQEIAGSKDTVGQYESHTAFTLPGLYRVVHGIDVFDPKFNIVSPGADMSIYFPYTEEKRRLTKFHPEIEELLYSDVENKEHLCVLKDKKKPILFTMARLDRVKNLSGLVEWYGKNTRLRELANLVVVGGDRRKESKDNEEKAEMKKMYDLIEEYKLNGQFRWISSQMDRVRNGELYRYICDTKGAFVQPALYEAFGLTVVEAMTCGLPTFATCKGGPAEIIVHGKSGFHIDPYHGDQAADLLADFFTKCKEDPSHWDEISKGGLQRIEEKYTWQIYSQRLLTLTGVYGFWKHVSNLDRLEARRYLEMFYALKYRPLAQAVPLAQDD

SEQ ID NO: 31 - protein, 808 aa, synthetic construct
MANAERMITRVHSQRERLNETLVSERNEVLALLSRVEAKGKGILQQNQIIAEFEALPEQTRKKLLGGPFFDLLKSTQEAIVLPPWVALAVRPRPGVWEYLRVNLHALVVEELQPAEFLHFKEELVDGVKNGNFTLELDFEPFNASIPRPTLHKYIGNGVDFLNRHLSAKLFHDKESLLPLLKFLRLHSHQGKNLMLSEKIQNLNTLQHTLRKAEEYLAELPSETPYEEFEAKFQEIGLERGWGDNAERVLDMIRLLLDLLEAPDPCTLETFLGRVPMVFNVVILSPHGYFAQDNVLGYPDTGGQVVYILDQVRALENEMLQRIKQQGLNIKPRILILTRLLPDAVGTTCGQRLERVYDSEYCHILRVPFRTEKGIVRKWISRFEVWPYLETYTEDAAVELSKELNGKPDLIIGNYSDGNLVASLLAHKLGVTQCTIAHALEKTKYPDSDIYWKKLDDKYHFSCQFTADIFAMNHTDFIITSTFQEIAGSKDTVGQYESHTAFTLPGLYRVVHGIDVFDPKFNIVSPGADMSIYFPYTEEKRRLTKFHPEIEELLYSDVENKEHLCVLKDKKKPILFTMARLDRVKNLSGLVEWYGKNTRLRELANLVVVGGDRRKESKDNEEKAEMKKMYDLIEEYKLNGQFRWISSQMDRVRNGELYRYICDTKGAFVQPALYEAFGLTVVEAMTCGLPTFATCKGGPAEIIVHGKSGFHIDPYHGDQAADTLADFFTKCKEDPSHWDEISKGGLQRIEEKYTWQIYSQRLLTLTGVYGFWKHVSNLDRLEARRYLEMFYALKYRPLAQAVPLAQDD

SEQ ID NO: 32 - protein, 808 aa, synthetic construct
MANAERMITRVHSQRERLNETLVSERNEVLALLSRIEAKGKGILQQNQIIAEFEALPEQTEKKLLGGPFFDLLKSTQEAIVLPPWIALAVRPRPGVWEYLRVNLNALVVEELQPAEFLHFKEELVDGSSNGNFTLELDFEPFNASIPRPTLHKYIGNGVQFLNRHLSAKLFHDKESLYPLLEFLRLHCHRGKTLMLSDKIQNLNTLQHTLRKAEEYLSTLKPETPYEEFEHKFEEIGLERGWGDNAERVLEMIRLLLDLLEAPDPCTLEKFLGRVPMVFNVVILSPHGYFAQDNVLGYPDTGGQVVYILDQVRALENEMLKRIKQQGLNIKPRILILTRLLPDAVGTTCGQRLERVYDSEYCHILRVPFRTEKGIVRKWISRFEVWPYLETYTEDAANELAKELQGKPDLIIGNYSDGNLVASLLAHKLGVTQCTIAHALEKTKYPDSDIYWKKLDDKYHFSCQFTADLFAMNHTDFIITSTFQEIAGSKDTVGQYESHTAFTLPGLYRVVHGIDVFDPKFNIVSPGADMSIYFPYTEEKRRLTKFHPEIEELLYSDVENKEHLCVLKDKNKPILFTMARLDRVKNLSGLVEWYGKNTRLRELANLVVVGGDRRKESKDNEEQAEMKKMYDLIEKYKLNGQFRWISAQMNRVRNGELYRYICDTKGAFVQPALYEAFGLTVVEAMTCGLPTFATCHGGPAEIIVHGKSGFHIDPYHGDQAADLLADFFEKCKEDPSHWDEISQGGLQRIEEKYTWQIYSQRLLTLAGVYGFWKHVSNLDRLEARRYLEMFYALKYRPLAQAVPLAQDD

SEQ ID NO: 33 - protein, 808 aa, synthetic construct
MANAERMITRVHSQRERLNETLVSERNEVLALLSRIEAKGKGILQQNQIIAEFEALPEQTRKKLNGGPFFDLLKSTQEAIVLPPWVALAVRPRPGVWEYLRVNLHALVVEELQPAEFLHFKEELVDGVSNGNFTLELDFEPFNASIPRPTLHKYIGNGVQFLNRHLSAKLFHDKESLYPLLKFLRLHCHRGKNLMLSDKIQNLNTLQHTLRKAEEYLATLKPETPYEEFEHKFEEIGLERGWGDNAERVLEMIRLLLDLLEAPDPCTLETFLGRVPMVFNVVILSPHGYFAQDNVLGYPDTGGQVVYILDQVRALENEMLQRIKQQGLNIKPRILILTRLLPDAVGTTCGQRLERVYDSEYCHILRVPFRTEKGIVRKWISRFEVWPYLETYTEDAANELSKELQGKPDLIIGNYSDGNLVASLLAHKLGVTQCTIAHALEKTKYPDSDIYWKKLDDKYHFSCQFTADLFAMNHTDFIITSTFQEIAGSKDTVGQYESHTAFTLPGLYRVVHGIDVFDPKFNIVSPGADMSIYFPYTEEKRRLTKFHPEIEELLYSDVENKEHLCVLKDKNKPILFTMARLDRVKNLSGLVEWYGKNTRLRELANLVVVGGDRRKESKDNEEKAEMKKMYDLIEEYKLNGQFRWISSQMNRVRNGELYRYICDTKGAFVQPALYEAFGLTVVEAMTCGLPTFATCHGGPAEIIVHGKSGFHIDPYHGDQAADLLADFFTKCKEDPSHWDEISKGGLQRIEEKYTWQIYSQRLLTLTGVYGFWKHVSNLDRLEARRYLEMFYALKYRPLAQAVPLAQDD

SEQ ID NO: 34 - protein, 808 aa, synthetic construct
MANAERMITRVHSQRERLNETLVSERNEVLALLSRVEAKGKGILQQNQIIAEFEALPEQTRKKLLGGPFFDLLKSTQEAIVLPPWVALAVRPRPGVWEYLRVNLHALVVEELQPAEFLHFKEELVDGVKNGNFTLELDFEPFNASIPRPTLHKYIGNGVEFLNRHLSAKLFHDKESLYPLLKFLRLHSHRGKNLMLSDKIQNLNTLQHTLRKAEEYLAELKSETPYEEFEHKFEEIGLERGWGDNAERVLEMIRLLLDLLEAPDPCTLETFLGRVPMVFNVVILSPHGYFAQDNVLGYPDTGGQVVYILDQVRALENEMLQRIKQQGLNIKPRILILTRLLPDAVGTTCGQRLERVYDSEYCHILRVPFRTEKGIVRKWISRFEVWPYLETYTEDAAVELSKELNGKPDLIIGNYSDGNLVASLLAHKLGVTQCTIAHALEKTKYPDSDIYWKKLDDKYHFSCQFTADLFAMNHTDFIITSTFQEIAGSKDTVGQYESHTAFTLPGLYRVVHGIDVFDPKFNIVSPGADMSIYFPYTEEKRRLTKFHPEIEELLYSDVENKEHLCVLKDKKKPILFTMARLDRVKNLSGLVEWYGKNTRLRELANLVVVGGDRRKESKDNEEKAEMKKMYDLIEEYKLNGQFRWISSQMNRVRNGELYRYICDTKGAFVQPALYEAFGLTVVEAMTCGLPTFATCHGGPAEIIVHGKSGFHIDPYHGDQAADLLADFFTKCKEDPSHWDEISKGGLQRIEEKYTWQIYSQRLLTLTGVYGFWKHVSNLDRLEARRYLEMFYALKYRPLAQAVPLAQDD

SEQ ID NO: 35 - protein, 808 aa, synthetic construct
MANAERMITRVHSQRERLNETLVSERNEVLALLSRVEAKGKGILQQNQIIAEFEALPEQTRKKLLGGPFFDLLKSTQEAIVLPPWVALAVRPRPGVWEYLRVNLHALVVEELQPAEFLHFKEELVDGVKNGNFTLELDFEPFNASIPRPTLHKYIGNGVDFLNRHLSAKLFHDKESLLPLLKFLRLHSHRGKNLMLSEKIQNLNTLQHTLRKAEEYLAELKSETPYEEFEAKFEEIGLERGWGDNAERVLEMIRLLLDLLEAPDPCTLETFLGRVPMVFNVVILSPHGYFAQDNVLGYPDTGGQVVYILDQVRALENEMLQRIKQQGLNIKPRILILTRLLPDAVGTTCGQRLERVYDSEYCHILRVPFRTEKGIVRKWISRFEVWPYLETYTEDAAVELSKELNGKPDLIIGNYSDGNLVASLLAHKLGVTQCTIAHALEKTKYPDSDIYWKKLDDKYHFSCQFTADLFAMNHTDFIITSTFQEIAGSKETVGQYESHTAFTLPGLYRVVHGIDVFDPKFNIVSPGADMSIYFPYTEEKRRLTKFHPEIEELLYSDVENKEHLCVLKDKKKPILFTMARLDRVKNLSGLVEWYGKNTRLRELANLVVVGGDRRKESKDNEEKAEMKKMYDLIEEYKLNGQFRWISSQMDRVRNGELYRYICDTKGAFVQPALYEAFGLTVVEAMTCGLPTFATCKGGPAEIIVHGKSGFHIDPYHGDQAADTLADFFTKCKEDPSHWDEISKGGLQRIEEKYTWQIYSQRLLTLTGVYGFWKHVSNLDRLEARRYLEMFYALKYRPLAQAVPLAQDD

SEQ ID NO: 36 - protein, 808 aa, synthetic construct
MANAERMITRVHSQRERLNETLVSERNEVLALLSRVEAKGKGILQQHQIIAEFEALPEQTRRKLEGGPFFDLLKSTQEAIVLPPWVALAVRPRPGVWEYLRVNLHALVVEELQPAEFLHFKEELVDGVSNGNFTLELDFEPFNASIPRPTLHKYIGNGVQFLNRHLSAKLFHDKESLLPLLKFLRLHCHQGKTLMLSEKIQNLNTLQHVLRKAEEYLATLKPETLYEEFEHKFQEIGLERGWGDNAERVLDMIRLLLDLLEAPDPCTLEKFLGRVPMVFNVVILSPHGYFAQDNVLGYPDTGGQVVYILDQVRALEIEMLQRIKQQGLDIKPRILILTRLLPDAVGTTCGQRLERVYDSEYCDILRVPFRTEKGIVRKWISRFEVWPYLETYTEDAANELSKELQGKPDLIIGNYSDGNLVASLLAHKLGVTQCTIAHALEKTKYPDSDIYWKKLDDKYHFSCQFTADLFAMNHTDFIITSTFQEIAGSKETVGQYESHTAFTLPGLYRVVHGIDVFDPKFNIVSPGADMSIYFPYTEEKRRLTKFHSEIEELLYSDVENKEHLCVLKDKNKPILFTMARLDRVKNLSGLVEWYGKNTRLRELANLVVVGGDRRKESKDNEEKAEMKKMYDLIEEYKLNGHFRWISSQMNRVRNGELYRYICDTKGAFVQPALYEAFGLTVVEAMTCGLPTFATCYGGPAEIIVHGKSGFHIDPYHGDQAAELLADFFEKCKEDPSHWDEISKGGLQRIEEKYTWQIYSQRLLTLTGVYGFWKHVSNLDRLEARRYLEMFYALKYRPLAQAVPLAQDD

SEQ ID NO: 37 - protein, 808 aa, synthetic construct
MANAERMITRVHSQRERLNETLVSERNEVLALLSRVEAKGKGILQQNQIIAEFEALPEQTRRKLEGGPFFDLLKSTQEAIVLPPWVALAVRPRPGVWEYLRVNLHALVVEELQPAEFLHFKEELVDGVKNGNFTLELDFEPFNASIPRPTLHKYIGNGVDFLNRHLSAKLFHDKESLLPLLKFLRLHSHQGKNLMLSEKIQNLNTLQHTLRKAEEYLAELKPETLYEEFEAKFQEIGLERGWGDNAERVLDMIRLLLDLLEAPDPCTLETFLGRVPMVFNVVILSPHGYFAQDNVLGYPDTGGQVVYILDQVRALEIEMLQRIKQQGLNIKPRILILTRLLPDAVGTTCGQRLERVYDSEYCDILRVPFRTEKGIVRKWISRFEVWPYLETYTEDAAVELSKELNGKPDLIIGNYSDGNLVASLLAHKLGVTQCTIAHALEKTKYPDSDIYWKKLDDKYHFSCQFTADIFAMNHTDFIITSTFQEIAGSKETVGQYESHTAFTLPGLYRVVHGIDVFDPKFNIVSPGADMSIYFPYTEEKRRLTKFHSEIEELLYSDVENKEHLCVLKDKKKPILFTMARLDRVKNLSGLVEWYGKNTRLRELANLVVVGGDRRKESKDNEEKAEMKKMYDLIEEYKLNGQFRWISSQMDRVRNGELYRYICDTKGAFVQPALYEAFGLTVVEAMTCGLPTFATCKGGPAEIIVHGKSGFHIDPYHGDQAAETLADFFTKCKEDPSHWDEISKGGLQRIEEKYTWQIYSQRLLTLTGVYGFWKHVSNLDRLEARRYLEMFYALKYRPLAQAVPLAQDD

SEQ ID NO: 38 - protein, 808 aa, synthetic construct
MANAERMITRVHSQRERLNETLVSERNEVLALLSRIEAKGKGILQHHQIIAEFEALPEQTEKKLQGGPFGDLLKSTQEAIVLPPWVALAVRPRPGVWEYLRVHLNALVVEELQPAEFLHFKEELVDGSSNGNFTLELDFEPFNASIPRPTLHKYIGNGVEFLNRHLSAKLFHDKESLHPLLEFLRLHCHQGKNLMLNDKIQNLNTLQHVLRKAEEYLSTLPSETPYEEFEHKFQEIGLERGWGDNAERVLEMIRLLLDLLEAPDPCTLETFLGRVPMVFNVVILSPHGYFAQDNVLGYPDTGGQVVYILDQVRALENEMLKRIKQQGLDIKPRILILTRLLPDAVGTTCGERLERVYDSEYCHILRVPFRTEKGIVRKWISRFEVWPYLETYAEDAAVELAKELNGKPDLIIGNYSDGNLVASLLAHKLGVTQCTIAHALEKTKYPDSDIYWKKLDDKYHFSCQFTADIFAMNHADFIITSTFQEIAGSKDTVGQYESHTAFTLPGLYRVVHGIDVFDPKFNIVSPGADMSIYFPYTEEKRRLTSFHPEIEELLYSDVENKEHLCVLKDKNKPILFTMARLDRVKNLSGLVEWYGKNPRLRELANLVVVGGDRRKESKDNEEQAEMKKMYDLIEKYKLNGHFRWISSQMNRVRNGELYRYICDTKGAFVQPALYEAFGLTVVEAMTCGLPTFATCYGGPAEIIVHGKSGFHIDPYHGDKAAELLADFFEKCKEDPSHWDEISQGGLKRIEEKYTWKIYSQRLLTLTGVYGFWKHVSKLDRLEARRYLEMFYALKYRPLAQAVPLAQDD

SEQ ID NO: 39 - protein, 808 aa, synthetic construct
MANAERMITRVHSQRERLNETLVSERNEVLALLSRIEAKGKGILQQHQIIAEFEALPEQTRKKLQGGPFGDLLKSTQEAIVLPPWVALAVRPRPGVWEYLRVNLNALVVEELQPAEFLHFKEELVDGVSNGNFTLELDFEPFNASIPRPTLHKYIGNGVEFLNRHLSAKLFHDKESLYPLLKFLRLHCHQGKNLMLNDKIQNLNTLQHVLRKAEEYLATLPSETPYEEFEHKFQEIGLERGWGDNAERVLEMIRLLLDLLEAPDPCTLETFLGRVPMVFNVVILSPHGYFAQDNVLGYPDTGGQVVYILDQVRALENEMLQRIKQQGLDIKPRILILTRLLPDAVGTTCGERLERVYDSEYCHILRVPFRTEKGIVRKWISRFEVWPYLETYAEDAAVELSKELNGKPDLIIGNYSDGNLVASLLAHKLGVTQCTIAHALEKTKYPDSDIYWKKLDDKYHFSCQFTADIFAMNHADFIITSTFQEIAGSKDTVGQYESHTAFTLPGLYRVVHGIDVFDPKFNIVSPGADMSIYFPYTEEKRRLTKFHPEIEELLYSDVENKEHLCVLKDKNKPILFTMARLDRVKNLSGLVEWYGKNPRLRELANLVVVGGDRRKESKDNEEKAEMKKMYDLIEEYKLNGHFRWISSQMNRVRNGELYRYICDTKGAFVQPALYEAFGLTVVEAMTCGLPTFATCYGGPAEIIVHGKSGFHIDPYHGDKAAELLADFFEKCKEDPSHWDEISKGGLKRIEEKYTWQIYSQRLLTLTGVYGFWKHVSNLDRLEARRYLEMFYALKYRPLAQAVPLAQDD

SEQ ID NO: 40 - protein, 808 aa, synthetic construct
MANAERMITRVHSQRERLNETLVSERNEVLALLSRVEAKGKGILQQNQIIAEFEALPEQTRKKLEGGPFFDLLKSTQEAIVLPPWVALAVRPRPGVWEYLRVNLNALVVEELQPAEFLHFKEELVDGVKNGNFTLELDFEPFNASIPRPTLHKYIGNGVEFLNRHLSAKLFHDKESLYPLLKFLRLHSHQGKNLMLNDKIQNLNTLQHVLRKAEEYLATLPSETPYEEFEHKFQEIGLERGWGDNAERVLDMIRLLLDLLEAPDPCTLETFLGRVPMVFNVVILSPHGYFAQDNVLGYPDTGGQVVYILDQVRALENEMLQRIKQQGLNIKPRILILTRLLPDAVGTTCGERLERVYDSEYCHILRVPFRTEKGIVRKWISRFEVWPYLETYAEDAAVELSKELNGKPDLIIGNYSDGNLVASLLAHKLGVTQCTIAHALEKTKYPDSDIYWKKLDDKYHFSCQFTADIFAMNHADFIITSTFQEIAGSKDTVGQYESHTAFTLPGLYRVVHGIDVFDPKFNIVSPGADMSIYFPYTEEKRRLTKFHPEIEELLYSDVENKEHLCVLKDKKKPILFTMARLDRVKNLSGLVEWYGKNPRLRELANLVVVGGDRRKESKDNEEKAEMKKMYDLIEEYKLNGQFRWISSQMNRVRNGELYRYICDTKGAFVQPALYEAFGLTVVEAMTCGLPTFATCYGGPAEIIVHGKSGFHIDPYHGDKAAELLADFFTKCKEDPSHWDEISKGGLQRIEEKYTWQIYSQRLLTLTGVYGFWKHVSNLDRLEARRYLEMFYALKYRPLAQAVPLAQDD

SEQ ID NO: 41 - protein, 808 aa, synthetic construct
MANAERMITRVHSQRERLNETLVSERNEVLALLSRVEAKGKGILQQNQIIAEFEALPEQTRKKLEGGPFFDLLKSTQEAIVLPPWVALAVRPRPGVWEYLRVNLNALVVEELQPAEFLHFKEELVDGVKNGNFTLELDFEPFNASIPRPTLHKYIGNGVDFLNRHLSAKLFHDKESLYPLLKFLRLHSHQGKNLMLNEKIQNLNTLQHVLRKAEEYLAELPSETPYEEFEAKFQEIGLERGWGDNAERVLDMIRLLLDLLEAPDPCTLETFLGRVPMVFNVVILSPHGYFAQDNVLGYPDTGGQVVYILDQVRALENEMLQRIKQQGLNIKPRILILTRLLPDAVGTTCGERLERVYDSEYCHILRVPFRTEKGIVRKWISRFEVWPYLETYAEDAAVELSKELNGKPDLIIGNYSDGNLVASLLAHKLGVTQCTIAHALEKTKYPDSDIYWKKLDDKYHFSCQFTADIFAMNHADFIITSTFQEIAGSKDTVGQYESHTAFTLPGLYRVVHGIDVFDPKFNIVSPGADMSIYFPYTEEKRRLTKFHPEIEELLYSDVENKEHLCVLKDKKKPILFTMARLDRVKNLSGLVEWYGKNPRLRELANLVVVGGDRRKESKDNEEKAEMKKMYDLIEEYKLNGQFRWISSQMDRVRNGELYRYICDTKGAFVQPALYEAFGLTVVEAMTCGLPTFATCHGGPAEIIVHGKSGFHIDPYHGDQAAEILADFFTKCKEDPSHWDEISKGGLQRIEEKYTWQIYSQRLLTLTGVYGFWKHVSNLDRLEARRYLEMFYALKYRPLAQAVPLAQDD

SEQ ID NO: 42 - protein, 808 aa, synthetic construct
MANAERMITRVHSQRERLNETLVSERNEVLALLSRVEAKGKGILQQNQIIAEFEALPEQTRKKLLGGPFFDLLKSTQEAIVLPPWVALAVRPRPGVWEYLRVNLHALVVEELQPAEFLHFKEELVDGVKNGNFTLELDFEPFNASIPRPTLHKYIGNGVEFLNRHLSAKLFHDKESLYPLLKFLRLHSHQGKNLMLSDKIQNLNTLQHVLRKAEEYLATLPPETPYEEFEHKFQEIGLERGWGDNAERVLDMIRLLLDLLEAPDPCTLETFLGRVPMVFNVVILSPHGYFAQDNVLGYPDTGGQVVYILDQVRALENEMLQRIKQQGLNIKPRILILTRLLPDAVGTTCGQRLERVYGSEYCDILRVPFRTEKGIVRKWISRFEVWPYLETYTEDAAVELSKELNGKPDLIIGNYSDGNLVASLLAHKLGVTQCTIAHALEKTKYPDSDIYWKKLDDKYHFSCQFTADIFAMNHTDFIITSTFQEIAGSKDTVGQYESHTAFTLPGLYRVVHGIDVFDPKFNIVSPGADMSIYFPYTEEKRRLTKFHPEIEELLYSDVENKEHLCVLKDKKKPILFTMARLDRVKNLSGLVEWYGKNTRLRELANLVVVGGDRRKESKDNEEQAEMKKMYDLIEEYKLNGQFRWISSQMDRVRNGELYRYICDTKGAFVQPALYEAFGLTVVEAMTCGLPTFATCYGGPAEIIVHGKSGFHIDPYHGDQAADTLADFFTKCKEDPSHWDEISKGGLQRIEEKYTWQIYSQRLLTLTGVYGFWKHVSNLDRLEARRYLEMFYALKYRPLAQAVPLAQDD

SEQ ID NO: 43 - protein, 808 aa, synthetic construct
MANAERMITRVHSQRERLNETLVSERNEVLALLSRVEAKGKGILQQNQIIAEFEALPEQTRKKLLGGPFFDLLKSTQEAIVLPPWVALAVRPRPGVWEYLRVNLHALVVEELQPAEFLHFKEELVDGVKNGNFTLELDFEPFNASIPRPTLHKYIGNGVDFLNRHLSAKLFHDKESLYPLLKFLRLHSHQGKNLMLSEKIQNLNTLQHVLRKAEEYLAELPPETPYEEFEAKFEEIGLERGWGDNAERVLDMIRLLLDLLEAPDPCTLETFLGRVPMVFNVVILSPHGYFAQDNVLGYPDTGGQVVYILDQVRALENEMLQRIKQQGLNIKPRILILTRLLPDAVGTTCGQRLERVYDSEYCDILRVPFRTEKGIVRKWISRFEVWPYLETYTEDAAVELSKELNGKPDLIIGNYSDGNLVASLLAHKLGVTQCTIAHALEKTKYPDSDIYWKKLDDKYHFSCQFTADIFAMNHTDFIITSTFQEIAGSKETVGQYESHTAFTLPGLYRVVHGIDVFDPKFNIVSPGADMSIYFPYTEEKRRLTKFHPEIEELLYSDVENKEHLCVLKDKKKPILFTMARLDRVKNLSGLVEWYGKNTRLRELANLVVVGGDRRKESKDNEEKAEMKKMYDLIEEYKLNGQFRWISSQMDRVRNGELYRYICDTKGAFVQPALYEAFGLTVVEAMTCGLPTFATCKGGPAEIIVHGKSGFHIDPYHGDQAADTLADFFTKCKEDPSHWDEISKGGLQRIEEKYTWQIYSQRLLTLTGVYGFWKHVSNLDRLEARRYLEMFYALKYRPLAQAVPLAQDD

SEQ ID NO: 44 - protein, 793 aa, synthetic construct
MIEVLRQQLLDSPNSWRAFLRHLVASQRGIWLHTDLQHECKTFREQPPEGYPEDIGWLADFIAHCQEAIFLDPWMYFAWRLRPGVWEYVRIHVEQLAVEELSTDEYLQAKEQLVDGGPEGEAVLTVDFEDFRPVSQRLKDESTIGNGLEHLNRHLAGRIWTDLKEGRSAILEFLRLHRLDGQQLMLSDRITDFDSLRQAVQYLGTLPPETPWAEFREDMRRRGFEPGWGNTAGRVRETMRLLMDLLDSPSPAALEKFLARIPMISNVLIVSIHGWFAQDNVLGRPDTGGQVVYILDQARALEREMRNRLRQQGVDVEPRILIATRLIPEADGTTCDQRLEPVHGTEHVWILRVPFRYEDGRIHPHWISRFKVWPYLERYARDLEREVKAELGGRPDLIIGNYSDGNLVATILSEKLGVTQCNIAHALEKTKYPGSDLYWKKYEQQYHFACQFTADLIAMNAADIIITSTYQEIAGNDREVGQYESHQDYTLPGLYRVVNGIDVFDPKFNIVSPGADPSIYFPYTRKEERFSSLHPEIESLLFGREPGPDIRGVLEDPSKPIILSVARMDRIKNLSGLAEWYGRSARLRSLANLVIIGGHVDVQKSMDAEEREEIRRMHEIMDRYQLDGQMRWVGSHLDKRRVGELYRVVADRRGVFVQPALFEAFGLTVIEAMSSGLPVFATRHGGPLEIIEDGVSGFHIDPNDPDAVAEKLADFLERARERPKYWEEISQAALARVEERYTWERYAERLMTIARVFGFWRFVSSRERQVMRRYLQMFRHLQWRPLAHAVPME

SEQ ID NO: 45 - protein, 793 aa, synthetic construct
MIEVLRQQLLDSPNSWRAFLRHLVASQRGFWLHTDLQHACKTFREQPPEGYPEDIGPLADFIAHCQEAIFRDPWMVFAWRERPGVWEYVRIHVEQLAVEELSVDEYLQAKEQLVDGGAEGEAVLTVDFEDFRPVSQRLKDESTIGNGLEHLNRHLAGRIWTDLADGRSAILEFLRLHRLDGQQLMLSDRITDFDSLRQTLQYLGTLPRETPWAEFREDMRRRGFEPGWGNTAGRVRETMRLLMDLLDSPSPAALEKFLARIPMISNVLIVSIHGWFAQDNVLGRPDTGGQVVYILDQARALEREMRRRLRQQGVDVEPRILIATRLIPESDGTTCDQRLEPVHGAENVHILRVPFRYEDGRIHPHWISRFKVWPYLERYARDLEREVKAELGGRPDLIIGNYSDGNLVATILSEKLGVTQCNIAHALEKTKYPGSDLYWPKYEQDHHFACQFTADLIAMNAADIIITSTYQEIAGNDREVGQYESHQDYTLPGLYRVVNGIDVFDPKFNIVSPGADPSIYFSYSRKERRFSSLWPEIEELLFGREPGPDIRGVLEDPSKPIILSVARMDRIKNLSGLAELYGRNPRLRSLANLVIIGGHVDVQESMDAEEREEIRRMHEIMDRYQLDGQMRWVGSHLDKRVVGELYRVVADRRGVFVQPALFEAFGLTVIEAMSSGLPVFATRHGGPLEIIEDGVSGFHIDPNDPDAVAEKLADFFERARERPKYWEEISQAALQRVEERYTWERYAERLMTIARVYGFWRFVSSRERQVMRRYLQMFRHLQWRPLAHAVPME

SEQ ID NO: 46 - protein, 793 aa, synthetic construct
MIEVLRQQLKDSPNSWHAFLRHLVASQRGFWLHTDLQHACKTFREQPPEGYPEDIGPLADFIRHCQEAIFLDPWMVFAWRERPGVWEYVRIHVEQLAVEELSVDEYLQAKEELVDGGAEGEAVLTVDFEDFRPVSQRLKDESTIGNGLQHLNRHLAGRIWTDLKDGRSAILEFLRLHRLDGQQLMLSDRIQDFDSLRQTLQYLGTLPRDTPWAEFREDMRRRGFEPGWGNTAGRVRETMRLLMDLLDSPSPAALEKFLARIPMISNVLIVSIHGWFAQDNVLGRPDTGGQVVYILDQARALEREMRRRLRQQGVDVEPRILIATRLIPESKGTTCDQRLEPVHGAENVHILRVPFRYEDGRIHPHWISRFKVWPYLERYARDLEREVLAELGGRPDLIIGNYSDGNLVATILSEKLGVTQCNIAHALEKTKYPGSDLYWPKYEQQYHFACQFTADLIAMNAADIIITSTYQEIAGNDREVGQYESHQDYTLPGLYRVVNGIDVFDPKFNIVSPGADPSIYFSYSRKERRFSSLWPEIEELLFGREPGPDIRGVLEDPSKPIILSVARMDRIKNLSGLAELYGRNPRLRSLANLVIIGGHVDVQKSMDAEEREEIRRMHEIMDRYQLDGQMRWIGSHLDKRVVGELYRVVADRRGVFVQPALFEAFGLTVIEAMSSGLPVFATRHGGPLEIIEDGVSGFHIDPNDPDAVAEKLADFFERAREDPKYWEEISQAALQRVEERYTWERYAERLMTIARVYGFWRFVSSRERQVTRRYLQMFRHLQWRPLAHAVPME

SEQ ID NO: 47 - protein, 793 aa, synthetic construct
MIEVLRQQLLDHPNSWRAFLRHLVASQRGLWLHTDLQHECKTFREQPPEGYPEDIGPLADFIAHCQEAIFLDPWMYFAWRLRPGVWEYVRIHVEQLAVEELSVDEYLQAKEQLVGGGAEGEAVLTVDFEDFRPVSQRLKDESTIGDGLTHLNRHLAGRIWTDLAKGRSAILEFLRLHRLDGQQLMLSDRITDFDSLRQTVQYLGTLPPETPWAEFEEDMRRRGFEPGWGNTAGRVRETMRLLMDLLDSPSPAALESFLDRIPMISNVLIVSIHGWFAQDNVLGRPDTGGQVVYILDQARALEREMRNRLRQQGVDVEPRILIATRLIPESDGTTCDQRLEPVHGAEHVWILRVPFRYEDGRIHPHWISRFKVWPYLERYARDLEREVKAELGGRPDLIIGNYSDGNLVATILSEKLGVTQCNIAHALEKSKYPGSDLHWPDYEQDYHFACQFTADLIAMNAADIIVTSTYQEIAGNDREVGQYESHQDYTLPGLYRVENGIDVFDPKFNIVSPGADPSVYFSYTRKEERFSSLHPEIESLLFGREPGPDIRGVLEDPQKPIILSVARMDRIKNLSGLAELYGRSPRLRSLANLVIIGGHVDVQASMDAEEREEIRRMHEIMDRYQLDGQMRWVGSHLDKRRVGELYRVVADTRGVFVQPALFEAFGLTVIEAMSSGLPVFATRHGGPLEIIEDGVSGFHIDPNDPEAVAEKLADFLERARERPKYWEEISQAALARVSERYTWERYAERLMTIARVFGFWRFVLSRERQVMERYLQMFRHLQWRPLAHAVPME

SEQ ID NO: 48 - protein, 793 aa, synthetic construct
MIEVLRQQLLDHPNSWRAFLRHLVASQRGLWLHTDLQHECETFREQPPEGYPEDIGALADFIAHCQEAIFLDPWMYFAWRLRPGVWEYVRIHVEQLAVEELSVDEYLQAKEQLVKGGAEGEAVLTVDFEDFRPVSQRLKDESTIGNGLEHLNRHLAGRIWGDLAEGRSAILEFLRLHRLDGQNLMLSDRITDFDELRQALQYLGTLPPDTPWAEFREDMRRLGFEPGWGNTAQRVRETMRLLMDLLDSPSPAALEKFLDRIPMISNVLIVSIHGWFAQDNVLGRPDTGGQVVYILDQARALEREMRNRLRQQGVDVEPRILIATRLIPEADGTTCDQRLEPVHGTENVWILRVPFRYEDGRIHPHWISRFKVWPYLERYARDLEREVKAELGGRPDLIIGNYSDGNLVATILSEKLGVTQCNIAHALEKTKYPGSDLYWPKYEQQYHFACQFTADLIAMNAADIIITSTYQEIAGNDREVGQYESHQDYTLPGLYRVVNGIDVFDPKFNIVSPGADPSIYFSYSRKEERFSSLWPEIEELLFGREPGPDIRGVLEDPSKPIILSVARMDRIKNLSGLAELYGRSARLRELANLVIIGGHVDVQKSMDAEEREEIRRMHEIMDRYQLDGQMRWVGSHLDKRVVGELYRYVADKRGVFVQPALFEAFGLTVIEAMSSGLPVFATRHGGPLEIIEDGVSGFHIDPNDPEAVAEKLADFFERARERPKYWEEISQAALARVSERYTWERYAERLMTIARVYGFWRFVSSRESQVMERYLQMFRHLQWRPLAHAVPME

SEQ ID NO: 49 - protein, 793 aa, synthetic construct
MIEVLRQQLKDHPNAWRAFLRHLVASQRGLWLHTDLQHECETFREQPPEGYPEDNGALAEFIRHCQEAIFLDPWVYFAWRERPGVWEYVRIHVEQLAVEELSVDEYLQAKEELVDGGAEGEAVLTVDFEDFRRVSQRLKDESTIGNGLQHLNRHLAGRIWGDLRDGRRAILDFLRLHRIDGQNLMLSDRIQDFDALRQALQYLGKLPPDTPWSEFEEDMRRLGFEPGWGRTAQRVRETMRLLMDLLDSPSPATLEKFLDRIPMISNVLIVSIHGWFAQDNVLGRPDTGGQVVYILDQARALEREMRRRLREQGVDVEPRILIATRLIPDADGTTCDQRLEPVHGTENVWILRVPFRYEDGRIHPHWISRFKVWPYLERFARDLEREVLAELGGRPDLIIGNYSDGNLVATILSEKLGVTQCNIAHALEKTKYPGSDLYWPKYEEQYHFACQFTADLIAMNAADIIITSTYQEIAGNDNEVGQYESHQDYTLPGLYRVVHGIDVFDPKFNIVSPGADPSIYFSYSRKEERLSSLWPEIEELLFGREPGPDIRGVLKDPSKPIILSVARMDRIKNLSGLAELYGRSARLRELANLVIIGGHIDVKKSMDREEREEIRRMHEIMDEYNLDGQMRWIGSHLDKRVVGELYRYVADRRGVFVQPALFEAFGLTVIEAMASGLPVFATRHGGPLEIIEDGVSGFHIDPNDPEQVAEKLADFFERAREDPDYWEEISQAALKRVEERYTWERYAERLMTIARVYGFWRFVSSRERQVMERYLQMFRHLQWRPLAHAVPME

SEQ ID NO: 50 - protein, 793 aa, synthetic construct
MIEVLRQQLLDHPNAWRAFLRHLVASQRGLWLHTDLQHECETFREQPPEGYPEDNGALADFIKHCQEAIFLDPWVYFAWRLRPGVWEYVRIHVEQLAVEELSVDEYLQAKEELVDGGAEGEAVLTVDFEDFRRVSQRLKDESTIGNGLQHLNRHLAGRIWGDLKEGRNAILEFLRLHRLDGQNLMLSDRIQDFDQLRQALQYLGTLPPDTPWSEFEEDMRRLGFEPGWGNTAQRVRETMRLLMDLLDSPSPATLEKFLDRIPMISNVLIVSIHGWFAQDNVLGRPDTGGQVVYILDQARALEREMRNRLRQQGVDVEPRILIATRLIPEADGTTCDQRLEPVHGTENVWILRVPFRYEDGRIHPHWISRFKVWPYLERYARDLEREVLAELGGRPDLIIGNYSDGNLVATILSEKLGVTQCNIAHALEKTKYPGSDLYWPKYEEQYHFACQFTADLIAMNAADIIITSTYQEIAGNDNEVGQYESHQDYTLPGLYRVVHGIDVFDPKFNIVSPGADPSIYFSYSRKEERFSSLWPEIEELLFGREPGPDIRGVLEDPSKPIILSVARMDRIKNLSGLAELYGRSARLRELANLVIIGGHVDVQKSMDAEEREEIRRMHEIMDRYQLDGQMRWVGSHLDKRVVGELYRYVADRRGVFVQPALFEAFGLTVIEAMTSGLPVFATRHGGPLEIIEDGVSGFHIDPNDPEAVAEKLADFFERAREDPKYWEEISQAALQRVYERYTWERYAERLMTIARVYGFWRFVTSRESQVMERYLQMFRHLQWRPLAHAVPME

SEQ ID NO: 51 - protein, 793 aa, synthetic construct
MIEVLRQQLLDHPRAWRAFLRHLVASQRGIWLHHDLQHECENFREQPPEGYLEMTGPLAEFIKHCQEAIFLDPWMYFAWRERPGVWEYVRIHVEQLAVEELSVSEYLQAKEELVDGGSEGEAVLEVDFEDFRRVSQRLKDESTIGNGVQHLNRHLAGRLWTDLKEGMSAILEFLRLHRLDGQQLMLSDRIQDFDSLRQALQYLGTLPRDTPWSEFEEEMRRLGFEPGWGDTAGRVRETMRLLMDLLDSPSPAALEKFLDRIPMISNVLIVSIHGYFGQDNVLGRPDTGGQVVYILDQARALEREMRDRLRQQGVDVEPRILIATRLIPEADGTTCDQRLEPVHGTEHVWILRVPFRYEDGRIHPHWISRFKVWPYLERYARDLEREVLAELGGRPDLIIGNYSDGNLVATILSEKLGVTQCNIAHALEKTKYPGSDLYWRKYEEQYHFACQFTADLIAMNAADIIITSTYQEIAGNDNEVGQYESHQAYTLPGLYRVVNGIDVFDPKFNIVSPGADPSIYFPYSRKERRFSSLHPEIERLLFGREPGPEIRGVLEDPSKPIILSVARMDRIKNLSGLAEWYGRNARLRELANLVIIGGHIDVQKSMDREEREEIRRMHEIMDRYNLDGQMRWVGSHLDKRRVGELYRVVADTRGVFVQPALFEAFGLTVIEAMASGLPVFATRHGGPAEIIEDGVSGFHIDPNDPDAVAEKLADFFERAREDPDYWEEISQAALQRVYERYTWERYAERLMTIARVYGFWKFVSSRERQVTRRYLQMFRHLQWRPLAHAVPME

SEQ ID NO: 52 - protein, 793 aa, synthetic construct
MIEVLRQQLLDHPRSWRAFLRHLVASQRGIWLHTDLQHECKTFREQPPEGYLEDIGPLADFIRHCQEAIFLDPWMYFAWRLRPGVWEYVRIHVEQLAVEELSVSEYLQAKEQLVDGGAEGEAVLTVDFEDFRRVSQRLKDESTIGNGVEHLNRHLAGRIWTDLKEGRSAILEFLRLHRLDGQQLMLSDRITDFDSLRQAVQYLGTLPRDTPWAEFREDMRRRGFEPGWGNTAGRVRETMRLLMDLLDSPSPAALEKFLDRIPMISNVLIVSIHGWFAQDNVLGRPDTGGQVVYILDQARALEREMRNRLRQQGVDVEPRILIATRLIPEADGTTCDQRLEPVHGTENVWILRVPFRYEDGRIHPHWISRFKVWPYLERYARDLEREVKAELGGRPDLIIGNYSDGNLVATILSEKLGVTQCNIAHALEKTKYPGSDLYWKKYEQQYHFACQFTADLIAMNAADIIITSTYQEIAGNDREVGQYESHQDYTLPGLYRVENGIDVFDSKFNIVSPGADPSIYFSYSRKEERFSSLWPEIESLLFGREPGPDIRGVLEDPSKPIILSVARMDRIKNLSGLAEWYGRSARLRSLANLVIIGGHIDVQKSMDAEEREEIRRMHEIMDRYQLDGQMRWVGSHLDKRRVGELYRVVADTRGVFVQPALFEAFGLTVIEAMSSGLPVFATRHGGPLEIIEDGVSGFHIDPNDPEAVAEKLADFFERARERPKYWEEISQAALQRVEERYTWERYAERLMTIARVFGFWKFVTSRERQVMERYLQMFRHLQWRPLAHAVPME

SEQ ID NO: 53 - protein, 793 aa, synthetic construct
MIEVLRQQLLDHRREWRAFLRHLVASQRGIWLHTDLQHACKTFREQPPEGYPEDIGPLADFIKHCQEAIFRDPWMVFAWRLRPGVWEYVRIHVEQLAVEELSTDEYLQAKEQLVDGGAEGEAVLTVDFEDFRRVSQRLKDESTIGDGLTHLNRHLAGRIWTDLAAGRYQILEFLRLHRIDGQNLMLSDRMTDFDSLRQALQYLGTLPPETPWAEFREEMRRRGFEPGWGNTAGRVRETMRLLMDLLDSPSPAALESFLARIPMISNVLIVSIHGWFAQDNVLGRPDTGGQVVYILDQARALEREMRNRLRQQGVDVEPRILIATRLIPEADGTTCDQRLEPVHGAENVQILRVPFRYEDGRIHPHWISRFKVWPYLERYARDLEREVKAELGGRPDLIIGNYSDGGLVATILSEKLGVTQCNIAHALEKTKYPGSDLYWPKYEQDYHFACQFTADLIAMNAADIIITSTYQEIAGNDDEVGQYESHQDYTLPGLYRVENGIDVFDPKFNIVSPGADPSIYFSYTRKEERFSSLHPEIESLLFGREPGPDIRGVLEDPSKPIILSVARMDRIKNLSGLAELYGRSARLRELANLVIIGGHVDVQASMDAEEREEIRRMHEIMDRYQLDGQMRWVGSHLDKRRVGELYRVVADRRGVFVQPALFEAFGLTVIEAMSSGLPVFATRHGGPLEIIEDGVSGFHIDPNDPEAVAEKLADFFERARERPKYWEEISQAALARVSERYTWERYAERLMTIARCFGFWRFVLSRESQVMERYLQMFRHLQWRPLAHAVPME

SEQ ID NO: 54 - protein, 793 aa, synthetic construct
MIEVLRQQLEDHRREWRAFLRHLVASGRGIWLHHDLQHECETFREQPPLGYLEDNGPLAEFIKHCQEAIVLDPWIVFAWRLRPGVWEYVRIHVEQLDVEELSVDEYLQAKEQLVDGGAEGEAVLTVDFEDFRRTSQRLKDESTIGNGLQHLNRHLAGRLWTDLKEGREALLEFLRLHRIDGQNLMLSDRMQSFDSLRQALQYLGTLPPDTPWSEFEEEMRRLGFEPGWGRTAGRVRETMRLLMDLLDSPSPATLEKFLARIPMISNVLIVSPHGWFGQDNVLGRPDTGGQVVYILDQARALEREMRERLRQQGVDVEPRILIVTRLIPEADGTTCDQRLEPVHGAEHVHILRVPFRYEDGRIHPHWISRFKVWPYLERFAQDVEREVLAELGGRPDLIIGNYSDGNLVATLLSEKLGVTQCNIAHALEKTKYPGSDLYWPKYEEQYHFACQFTADLIAMNAADIIITSTYQEIAGNDDEVGQYESHQDYTLPGLYRVVHGIDVFDPKFNIVSPGADPSIYFSYSRKEERLSSLHPEIEELLYGREPGPDIRGVLEDPDKPIILSVARMDRIKNLSGLAELYGRSARLRELANLVIIGGHVDVQKSNDREEREEIRRMHEIMDRYNLDGQMRWVGAHLDKRRVGELYRVVADRRGVFVQPALFEAFGLTVIEAMASGLPVFATRHGGPLEIIEHGVSGFHIDPNDPEAVAEKLADFFERAREDPKYWEEISQAALQRVYERYTWELYAERLMTIARIYGFWRYVLSRERQVTERYLQMFRHLQWRPLAHAVPME

SEQ ID NO: 55 - protein, 793 aa, synthetic construct
MIEVLRQQLLDHRREWRAFLRHLVASQRGIWLHTDLQHECETFREQPPEGYPEDIGPLADFIKHCQEAIFLDPWMVFAWRLRPGVWEYVRIHVEQLAVEELSVDEYLQAKEQLVDGGAEGEAVLTVDFEDFRRVSQRLKDESTIGDGLEHLNRHLAGRIWTDLKAGRYQILEFLRLHRIDGQNLMLSDRMTDFDSLRQALQYLGTLPPETPWAEFREEMRRRGFEPGWGRTAGRVRETMRLLMDLLDSPSPAALEKFLARIPMISNVLIVSPHGWFAQDNVLGRPDTGGQVVYILDQARALEREMRERLRQQGVDVEPRILIATRLIPEADGTTCDQRLEPVHGAENVHILRVPFRYEDGRIHPHWISRFKVWPYLERYARDLEREVKAELGGRPDLIIGNYSDGNLVATILSEKLGVTQCNIAHALEKTKYPGSDLYWPKYEQQYHFACQFTADLIAMNAADIIITSTYQEIAGNDDEVGQYESHQDYTLPGLYRVVHGIDVFDPKFNIVSPGADPSIYFSYTRKEERFSSLHPEIESLLFGREPGPDIRGVLEDPDKPIILSVARMDRIKNLSGLAELYGRSARLRELANLVIIGGHVDVQKSNDAEEREEIRRMHEIMDRYQLDGQMRWVGSHLDKRRVGELYRVVADRRGVFVQPALFEAFGLTVIEAMSSGLPVFATRHGGPLEIIEHGVSGFHIDPNDPEAVAEKLADFFERARERPKYWEEISQAALQRVEERYTWERYAERLMTIARIYGFWRFVLSRERQVMERYLQMFRHLQWRPLAHAVPME

SEQ ID NO: 56 - protein, 793 aa, synthetic construct
MIEVLRQQLSDHPRSWYAFLRHLVASQRGLWLHTDLQHEFKHFREQPPEGYPEDIGWLADFVEHCQEAIFLDPWMYFAWRERPGVWEYVRIHVEQLAVEELSVDEYLQAKEQLVDGGAEGEAVLTVDFEDFRRVSQRLKDESTIGNGVQHLNRHLAGRIWTDLKEGRDAILEFLRLHRLDGQQLMLSDRITDFDSLRQALQYLGTLPPDTPWAEFREDMRRLGFEPGWGNTAGRVRETMRLLMDLLDSPSPAALEKFLARIPMISNVLIVSIHGWFAQDNVLGRPDTGGQVVYILDQARALEREMRNRLRQQGVDVEPRILIATRLIPESDGTTCDQRLEPVHGTEHVWILRVPFRYEDGRIHPHWISRFKVWPYLERYARDLEREVKAELGGRPDLIIGNYSDGNLVATILSEKLGVTQCNIAHALEKTKYPGSDLYWKKYEQQYHFACQFTADLIAMNAADIIITSTYQEIAGTDREVGQYESHQDYTLPGLYRVENGIDVFDPKFNIVSPGADPSIYFPYSRKEERFSSLWPEIESLLFGREPGPDIRGVLEDPSKPIILSVARMDRIKNLSGLAEWYGRNPRLRSLANLVIIGGHVDVQASMDAEEREEIRRMHEIMDRYQLDGQMRWVGSHLDKRRVGELYRVVADTRGVFVQPALFEAFGLTVIEAMSSGLPVFATRHGGPLEIIEDGVSGFHIDPNDPEAVAEKLADFFERARERPKYWEEISQAALQRVEERYTWERYAERLMTIARCYGFWKFVLSRERQVMERYLQMFRHLQWRPLAHAVPME

SEQ ID NO: 57 - protein, 793 aa, synthetic construct
MIEVLRQQLSDHPRSWYAFLRHLVASQRGFWLHHDLQHEFKHFREQPPEGYPEDIGWLADFVEHCQEAIFLDPWMYFAWRERPGVWEYVRIHVEQLAVEELSVDEYLQAKEELVDGGAEGEAVLTVDFEDFRRVSQRLKDESTIGNGVQHLNRHLAGRIWGDLKEGREAILEFLRLHRLDGQQLMLSDRIQDFDSLRQALQYLGTLPPDTPWSEFREEMRRLGFEPGWGDTAGRVRETMRLLMDLLDSPSPAALEKFLARIPMISNVLIVSIHGWFAQDNVLGRPDTGGQVVYILDQARALEREMRNRLRQQGVDVEPRILIATRLIPESDGTTCDQRLEPVHGTEHVWILRVPFRYEDGRIHPHWISRFKVWPYLERYARDLEREVKAELGGRPDLIIGNYSDGNLVATILSEKLGVTQCNIAHALEKTKYPGSDLYWRKYEEQYHFSCQFTADLIAMNAADIIITSTYQEIAGTDREVGQYESHQDYTLPGLYRVEHGIDVFDPKFNIVSPGADPSIYFPYSRKEERFSSLWPEIEELLFGREPGPDIRGVLEDPSKPIILSVARMDRIKNLSGLAEWYGRNPRLRELANLVIIGGHVDVQKSNDAEEREEIRRMHEIMDRYQLDGQMRWVGSHTDKRRVGELYRVVADTRGVFVQPALFEAFGLTVIEAMSSGLPVFATRHGGPLEIIEDGVSGFHIDPNDPDAVAEKLADFFERAREDPKYWEEISQAALQRVEERYTWELYAERLMTIARCYGFWKFVLSRERQVMRRYLQMFRHLQWRPLAHAVPME

SEQ ID NO: 58 - protein, 793 aa, synthetic construct
MIEVLRQQLLDHPRSWYAFLRHLVASQRGFWLHTDLQHEFKTFREQPPEGYPEDIGWLADFVEHCQEAIFLDPWMYFAWRLRPGVWEYVRIHVEQLAVEELSVDEYLQAKEQLVGGGAEGEAVLTVDFEDFRPVSQRLKDESTIGDGLEHLNRHLAGRIWTDLAEGRDAILEFLRLHRLDGQNLMLSDRITDFDSLRQAVQYLGTLPPETPWAEFREDMRRMGFEPGWGNTAGRVRETMRLLMDLLDSPSPAALEKFLARIPMISNVLIVSIHGWFAQDNVLGRPDTGGQVVYILDQARALEREMRNRLRQQGVDVEPRILIATRLIPESDGTTCDQRLEPVHGTENVWILRVPFRYEDGRIHPHWISRFKVWPYLERYARDLEREVKAELGGRPDLIIGNYSDGGLVATILSEKLGVTQCNIAHALEKTKYPGSDLYWKKYEQDYHFACQFTADLIAMNAADIIITSTYQEIAGTDREVGQYESHQDYTLPGLYRVENGIDVFDPKFNIVSPGADPSIYFPYSRHEERFSSLWPEIESLLFGREPGPDIRGVLEDPQKPIILSVARMDRIKNLSGLAEWYGRNPRLRSLANLVIIGGHVDVQASMDAEEREEIRRMHEIMDRYQLDGQMRWVGSHLDKRRVGELYRVVADGRGVFVQPALFEAFGLTVIEAMSSGLPVFATRHGGPLEIIEDGVSGFHIDPNDPEAVAEKLADFFERARERPKYWEEISQAALARVSERYTWERYAERLMTIARCYGFWRFVLSRERQVMERYLQMFRHLQWRPLAHAVPME

SEQ ID NO: 59 - protein, 793 aa, synthetic construct
MIEVLRQQLLDSPRSWRAFLRHLVASQRGLWLHHDLQHALKTFREQPPEGYPEDIGPLADFIAHCQEAIFRDPWMVFAWRLRPGVWEYVRIHVEQLAVEELSTDEYLQAKEQLVGGGAEGEAVLTVDFEDFRPVSQRLKDESTIGDGLEHLNRHLAGRIWTDLAEGRSRILEFLRLHRLDGQNLMLSDRITDFDSLRQTLQYLGTLPRETPWAEFREEMRRRGFEPGWGNTAGRVRETMRLLMDLLDSPSPAALETFLDRIPMISNVLIVSIHGWFAQDNVLGRPDTGGQVVYILDQARALEREMRNRLRQQGVDVEPRILIATRLIPESDGTTCDQRLEPVHGTENVHILRVPFRYEDGRIHPHWISRFKVWPYLERYARDLEREVKAELGGRPDLIIGNYSDGNLVATILSEKLGVTQCNIAHALEKSKYPGSDLYWKKYEQDYHFACQFTADLIAMNAADIIITSTYQEIAGTDREVGQYESHQDYTLPGLYRVENGIDVFDPKFNIVSPGADPSIYFSYSRHEERFSSLWPEIESLLFGREPGPDIRGVLEDPQKPIILSVARMDRIKNLSGLAELYGRSARLRELANLVIIGGHVDVQASMDAEEREEIRRMHEIMDRYQLDGQMRWIGSHLDKRVVGELYRVVADKRGVFVQPALFEAFGLTVIEAMSSGLPVFATRHGGPLEIIEDGVSGFHIDPNDPEAVAEKLADFFERARERPKYWEEISQAALARVSERYTWERYAERLMTIARCYGFWRFVLSRERQVMERYLQMFRHLQWRPLAHAVPME

SEQ ID NO: 60 - protein, 793 aa, synthetic construct
MIEVLRQQLLDSPRSWRAFLRHLVASQRGLWLHHDLQHELETFREQPPEGYPEDNGPLADFIAHCQEAIFRDPWMVFAWRLRPGVWEYVRIHVEQLAVEELSVDEYLQFKEQLVGGGAEGEAVLTVDFEDFRPTSQRLKDESTIGNGVQHLNRHLAGRIWTDLAEGRSRILEFLRLHRLDGQNLMLSDRITDFDSLRQALQYLGTLPRETPWAEFREEMRRRGFEPGWGNTAGRVRETMRLLMDLLDSPSPAALESFLDRIPMISNVLIVSPHGWFAQDNVLGRPDTGGQVVYILDQARALEREMRNRLRQQGVDVEPRILIATRLIPESDGTTCDQRLEPVHGTENVHILRVPFRYEDGRIHPHWISRFKVWPYLERYARDLEREVKAELGGRPDLIIGNYSDGNLVATILSEKLGVTQCNIAHALEKTKYPGSDLYWKKYEQQYHFACQFTADLIAMNAADIIITSTYQEIAGTDREVGQYESHQDYTLPGLYRVVHGIDVFDPKFNIVSPGADPSIYFSYSRKEERFSSLWPEIESLLFGREPGPDIRGVLEDPSKPIILSVARMDRIKNLSGLAELYGRSARLRELANLVIIGGHVDVQKSMDAEEREEIRRMHEIMDRYQLDGQMRWIGSHLDKRVVGELYRFVADKRGVFVQPALFEAFGLTVIEAMSSGLPVFATRHGGPLEIIEDGVSGFHIDPNDPEAVAEKLADFFERARERPKYWEEISQAALQRVEERYTWERYAERLMTIARCYGFWRFVLSRERQVMERYLQMFRHLQWRPLAHAVPME

SEQ ID NO: 61 - protein, 793 aa, synthetic construct
MIEVLRQQLSDHPNTWRAFLRHLVASGRDFWLHHDLWDACKTFREQPPEGYPEDIGWLEEFIRHCQEAIFRDPWMVFAWRERPGVWEYVRIHVEQLTVEELSTDEYLQFKEQLVGGGAEGNAVLTVDFEDFRPHSQRLKDESTIGNGLTHLNRHLAGRMWTDLGKGRSALIEFLSLHRLDGQQLMLSDRITDFDALRQTLQYLGTLPRDTPWSEFREDMQRLGFEPGWGDTAERVRETMRLLMDLLDSPSPAALEKFLGRIPMISNVLIVSIHGWFGQDNVLGRPDTGGQVVYILDQARALEREMRRRLYQQGVDVEPRILIATRLIPDADGTTCDQRLEPVSGTENVHILRVPFRYEDGTIHPHWISRFKVWPYLERFARDLEREVLAELGGRPDLIIGNYSDGNLVATLLSEKLGVTQCNIAHALEKSKYPGSDLYWPKYEDQYHFACQFTADLIAMNAADIIITSTYQEIAGNDREVGQYESYQDYTLPGLYRVVNGIDVFDSKFNIVSPGADPSVYFPYTRKERRFSSLHPEIEKLLFGDEPGPDHRGVLEDPDKPIILSVARLDRIKNLSGLAEWYGRSNRLRELANLVIVGGHVDVQKSNDGEEREEIRRMHEIMDRYNLDGQMRWVGSHLDKNRVGELYRYVADKRGVFVQPALFEAFGLTVIEAMASGLPVFATRHGGPLEIIEDGVSGFHIDPNHPEAVAEKLADFLERARERPSYWEKISQAALQRVEERYTWERYAERLMTIARCFGFWRFVSSREHQVTERYLQMFRHLQWRPLAHAVPME

SEQ ID NO: 62 - protein, 793 aa, synthetic construct
MIEVLRQQLSDHPRSWRAFLRHLVASQRDIWLHTDLQHACKTFREQPPEGYPEDIGPLADFIAHCQEAIFRDPWMVFAWRLRPGVWEYVRIHVEQLAVEELSTDEYLQAKEQLVGLGAEGEAVLTVDFEDFRPGFQRLKDESTIGDGLEHLNRHLAGRMWTDLAAGDSAILEFLGLHRLDGQQLMLSNGNTDFDSLRQTVQYLGTLPEETPWAEFREDMRRRGFEPGWGRTAGRVRETMRLLMDLLDSPSPAALESFLDRIPMISNVLIVSIHGWFAQDNVLGRPDTGGQVVYILDQARALEREMRNRLRQQGVDVEPRILIATRLIPESDGTTCDQRLEPVHGTENVWILRVPFRYEDGRIHPHWISRFKVWPYLERYARDLEREVLAELGSRPDLIIGNYSDGNLVATILSQKLGVTQCNIAHALEKSKYPGSDLHWPLYEQDYHFACQFTADLIAMNAADIIVTSTYQEIAGNDREVGQYESHQDYTLPGLYRVVNGIDVFDPKFNIVSPGADPSIYFPYTRHEERFSSLHPEIESLLFGREPGPDIRGVLEDPDKPIILSVARMDRIKNLSGLAELYGRSARLRELANLVIIGGHVDVQASMDAEEREEIRRMHEIMDRYQLDGQMRWVGSHLDKRVVGELYRYVADTRGAFVQPALFEAFGLTVIEAMSSGLPVFATRHGGPLEIIEDGVSGFHIDPNDPEAVAEKIADFLEAARERPKYWEEISQAALARVSERYTWERYAERLMTIARVYGFWRFVLSRESQVMRRYLQMFRHLQWRPLAHAVPME

SEQ ID NO: 63 - protein, 793 aa, synthetic construct
MIEVLRQQLSDHPNSWRAFLRHLVASGRDIWLHHDLQDACETFREQPPEGYPEDIGALAEFIRHCQEAIFRDPWMVFAWRLRPGVWYYVRIHVEQLVVEELSTDEYLQFKERLVGLGQEGEAVLTVDFEDFRPGFQRLKDESTIGRGLEHLNRHLAGRMWTDLAAGDEKLLEFLGLHRLDGQQLMLSERNQDFDSLRQALQYLGKLPPDTPWSELEEDMRRRGFEPGWGRTAGRVRETMRLLMDLLDSPSPAALEKFLDRIPMISNVLIVSIHGWFAQDNVLGRPDTGGQVVYILDQARALEREMRRRLRQQGVDVEPRILIATRLIPDADGTTCDQRLEPVSGTENVWILRVPFRYEDGRIHPHWISRFKVWPYLERFARDLEREVLAELGGRPDLIIGNYSDGNLVATILSEKLGVTQCNIAHALEKSKYPGSDLYWRKYEEQYHFACQFTADLIAMNAADIIITSTYQEIAGTDDEVGQYESHQDYTLPGLYRVVNGIDVFDPKFNIVSPGADPSIYFPYTRKERRFSSLHPEIERLLYGREPGPPHRGVLKDPDKPIILSVARLDRIKNLSGLAELYGRSARLRELANLVIIGGHVDVEKSNDHEEREEIRRMHEIMDRYNLDGQMRWLGSHLDKRVVGELYRYVADTRGAFVQPALFEAFGLTVIEAMSSGLPVFATRHGGPAEIIEDGVSGFHIDPNHPDQVAEKMADFLERAREDPKYWEKISQAALQRVEERYTWERYAERLMTLARVYGFWRFVLKRESQVMRRYLQMFRHLQWRPLAHAVPME

SEQ ID NO: 64 - protein, 793 aa, synthetic construct
MIEVLRQQLLDNPNEWRAFLRHLVASQRDSWLHHDLWDACKTFREQPPEGYPEDIGWLADFIAHCQEAIFRDPWMVFAWRLRPGVWEYVRIHVEQLAVEELSTDEYLQFKEQLVTGGAEGEAVLTVDFEDFRPGFQRLKDESTIGDGLTHLNRHLAGRIWTDLGAGRSAILEFLRLHRLDGQQLMLSNRNTDFDSLRQTLQYLGTLPRETPWAEFREDMRRMGFEPGWGDTAGRVRETMRLLMDLLDSPSPAALESFLDRIPMISNVLIVSIHGWFAQDNVLGRPDTGGQVVYILDQARALEREMRNRLRQQGVDVEPRILIATRLIPESDGTTCDQRLEPVHGAENVHILRVPFRYEDGRIHPHWISRFKVWPYLERYARDLEREVKAELGGRPDLIIGNYSDGNLVATILSEKLGVTQCNIAHALEKSKYPGSDLYWPKYEQDYHFACQFTADLIAMNAADIIVTSTYQEIAGNDREVGQYESHQDYTLPGLYRVVNGIDVFDPKFNIVSPGADPSIYFSYSRHEKRFSSLHPEIERLLFGREPGPPIRGVLEDPQKPIILSVARMDRIKNLSGLAEWYGRSARLRELANLVIIGGHVDVQKSMDAEEREEIRRMHEIMDRYQLDGQMRWVGSHLDKRVVGELYRYVADGRGVFVQPALFEAFGLTVIEAMSSGLPVFATRHGGPLEIIEDGVSGFHIDPNHPEAVAEKLADFLEAAREDPKYWEKISQAALARVEERYTWERYAERLMTIARVYGFWRFVLSRERQVMERYLQMFRHLQWRPLAHAVPME

SEQ ID NO: 65 - protein, 793 aa, synthetic construct
MIEVLRQQLSDHPNSWRAFLRHLVASQRDSWLHTDLQDACDTFREQPPEGYPEDIGPLAEFIAHCQEAIFRDPWMVFAWRLRPGVWEYYRIHVEQLAVEELSTSEYLQFKEQLVGGGAEGEAVLTVDFEDFRPGSQRLKDESTIGDGLQHLNRHLAGRIWTDLGAGRYAILEFLGLHRLDGQQLMLSDRFTDFDSLRQTLQYLGRLPRETPWAEFREDLRRWGFEPGWGDTAERVRETMRLLMDLLDSPSPAALEKFLARIPMISNVLIVSIHGWFAQDNVLGRPDTGGQVVYILDQARALEREMRERLRQQGVDVEPRILIATRLIPEADGTTCDQRLEPVHGAENVQILRVPFRYEDGRIHPHWISRFKVWPYLERYARDLEREVKAELGGRPDLIIGNYSDGNLVATILSEKLGVTQCNIAHALEKSKYPGSDLHWKKYEQDYHFACQFTADLIAMNAADIIVTSTYQEIAGNDREVGQYESYQDYTLPGLYRVVNGIDVFDPKFNIVSPGADPSIYFSYSETEKRLSSLHPEIEKLLFGREPGPDHRGVLEDPQKPIILSVARLDRIKNLSGLAEWYGRSARLRELANLVIIGGHVDVQASTDGEEREEIKRMHEIMDRYQLDGQMRWVGSHLDKRRVGELYRYVADGRGVFVQPALFEAFGLTVIEAMSSGLPVFATRHGGPLEIIEDGVSGFHIDPNHPEAVAEKLADFLEKARERPKYWEKISQAALQRVEERYTWERYAERLMTIARVFGFWRFVLKRESQVMERYLQMFRHLQWRPLAHAVPME

SEQ ID NO: 66 - protein, 793 aa, synthetic construct
MIEVLRQQLSDHPNDWHAFLRHLVASQRDIWLHHDLQDACEDFREQPPEGYPEGIGALADFIAHCQEAIFRDPWMVFAWRLRPGVWEYVRIHVEQLAVEELSTDEYLQFKEQLVGGGPEGEAVLEVDFEDFRRGFQRMKDESTIGNGLQHLNRHLAGRLWTDLAGGRSKLLEFLGVHRLDGQNLMLSNRNTDFDSLRQVIQYLGTLPDETPWAEFREDMRRMGFEPGWGDTAGRVRETMRLLMDLLDSPSPAALEKFLARIPMISNVLIVSIHGWFAQDNVLGRPDTGGQVVYILDQARALEREMRERLRQQGVDVEPRILIATRLIPDSDGTTCDQRLEPVHGAENVWILRVPFRYEDGRIHPHWISRFKVWPYLERYAEDLEREVKAELGSRPDLIIGNYSDGNLVASLLSEKLGVTQCNIAHALEKSKYPGSDLYWPKYEQQYHFACQFTADLIAMNAADIIVTSTYQEIAGNDREVGQYESYQAFTLPGLYRVVNGIDVFDPKFNIVSPGADPSIYFSYSRTEERLSSLHPEIEKLLFGREPGPDIRGVLEDPDKPIILSVARMDRIKNLTGLAEWYGRNPRLRELANLVIIGGHVDVQKSTDREEREEIRRMHEIMDRYQLDGQMRWIGSHLDKRVVGELYRVVADHRGVFVQPALFEAFGLTVIEAMASGLPVFATRHGGPLEIIEHGVSGFHIDPNHPDAVAEKLADFLEAAREDPKYWEEISQAALQRVEERYTWERYAERLMTIARCYGFWRFVSSRERQVTERYLQMFRHLQWRPLAHAVPME

SEQ ID NO: 67 - protein, 793 aa, synthetic construct
MIEVLRQQLLDHPESWRAFLRHLVASGRDFWLHTDLQHAFKTFREQPPEGYPEDIGVLADFIAHCQEAIFRDPWMVFAWRLRPGVWEYVRIHVEQLAVEELSTDEYLQFKEQLVGGGAEGEAVLTVDFEDFRPGFQRLKDESTIGDGLTHLNRHLAGRLWTDLGKGRSKLLEFLGLHRHDGQNLMLSNGNTDFDSLRQTVQYLGTLPRETPWAEFREDMRRMGFEPGWGDTAERVRETMRLLMDLLDSPSPAALESFLARIPMISNVLIVSPHGWFAQDKVLGRPDTGGQVVYILDQARALEREMRNRLRQQGVDVEPRILIATRLIPESDGTTCDQRLEPVHGAENVHILRVPFRYEDGRIHPHWISRFKVWPYLERYARDLEREVLAELGSRPDLIIGNYSDGNLVATLLSEKLGVTQCNIAHALEKSKYPDSDLYWPKYEQDYHFACQFTADLIAMNAADIIITSTYQEIAGTDREVGQYESHQDYTLPGLYRVINGIDVFDPKFNIVSPGADPSVYFPYSRHEERFSSLWPEIESLLFGREPGPDIRGVLEDPQKPIILSVARMDRIKNLTGLAEWYGRSPRLRELANLVIVGGHVDVQASMDAEEREEIRRMHEIMDRYQLDGQMRWLGSHLDKRRVGELYRYVADRRGVFVQPALFEAFGLTVIEAMSSGLPVFATRHGGPLEIIEHGVSGFHIDPNDPEAVAEKLADFLEAAREEPKYWEEISQAALARVSERYTWERYAERLMTLARVYGFWRFVLSRERQVTRRYLQMFRHLQWRPLAHAVPME

SEQ ID NO: 68 - protein, 793 aa, synthetic construct
MIEVLRQQLSDHPRSWRAFLRHLVASGRPLWLHHDLQDACETFREQPPEGYPEDIGWLADFIQHCQEAIFRDPWMYFAWRLRPGVWEYVRIHVEQLAVEELSVSEYLQFKEQLVGGESEGEAVLTVDFEDFRPVSQRLKDESTIGDGLTHLNRHLAGRIWQDLAAGRSAILEFLGLHRLDGQHLMLSDGNTDFDSLRQTVQYLGTLPEETPWSEFREDLRRMGFEPGWGDTAGRVRETMRLLMDLLDSPSPAALEKFLGRIPMISNVLIVSIHGWFAQDNVLGRPDTGGQVVYILDQARALEREMRERLRQQGVDVEPRILIATRLIPESKGTTCDQRLEPVHGAENVWILRVPFRYEDGRIHPHWISRFKVWPYLERFAEDLEREVKAELGSRPDLIIGNYSDGGLVATILSEKLGVTQCNIAHALEKTKYPGSDLYWKKYEQKYHFACQFTADLIAMNAADIIVTSTYQEIAGNDREVGQYESHQAYTLPGLYRVVNGIDVFDSKFNIVSPGADPSIYFPYSRTEERFSSLHPEIEKLLFGREPGPDHRGVLEDPDKPIILSVARMDRIKNLSGLAELYGRSARLRELANLVIIGGHVDVQKSMDAEEREEIRRMHEIMDRYNLDGQMRWIGSHLDKRRVGELYRVVADRRGVFVQPALFEAFGLTVIEAMSSGLPVFATRHGGPLEIIEDGVSGFHIDPNDPEAVAEKLADFLEAAREDPKYWEKISQAALKRVEERYTWERYAERLMTIARCFGFWKFVLSRERQVMRRYLQMFRHLQWRPLAHAVPME

SEQ ID NO: 69 - protein, 793 aa, synthetic construct
MIEVLRQQLADHPRSWRAFLRHLVASGRPLWLHTDLQHACKTFREQPPEGYPEDIGWLADFIAHCQEAIFRDPWMYFAWRLRPGVWEYVRIHVEQLAVEELSTDEYLQFKEQLVGGGAEGEAVLTVDFEDFRPVSQRLKDESTIGDGLTHLNRHLAGRIWQDLAAGRSAILEFLGLHRLDGQHLMLSDGNTDFDSLRQTVQYLGTLPEETPWAEFREDLRRRGFEPGWGDTAGRVRETMRLLMDLLDSPSPAALESFLGRIPMISNVLIVSIHGWFAQDNVLGRPDTGGQVVYILDQARALEREMRNRLRQQGVDVEPRILIATRLIPESDGTTCDQRLEPVHGAENVHILRVPFRYEDGRIHPHWISRFKVWPYLERYAEDLEREVKAELGSRPDLIIGNYSDGGLVATILSEKLGVTQCNIAHALEKSKYPGSDLYWKKYEQKYHFACQFTADLIAMNAADIIVTSTYQEIAGNDREVGQYESHQAYTLPGLYRVVNGIDVFDSKFNIVSPGADPSIYFSYSRTEERFSSLHPEIERLLFGREPGPDIRGVLEDPDKPIILSVARMDRIKNLSGLAELYGRSARLRELANLVIIGGHVDVQASMDAEEREEIRRMHEIMDRYQLDGQMRWVGSHLDKRRVGELYRVVADRRGVFVQPALFEAFGLTVIEAMSSGLPVFATRHGGPLEIIEDGVSGFHIDPNDPEAVAEKLADFLEAARERPKYWEEISQAALARVSERYTWERYAERLMTIARCFGFWKFVLSRERQVMRRYLQMFRHLQWRPLAHAVPME

SEQ ID NO: 70 - protein, 793 aa, synthetic construct
MIEELRQQLLDHRRSWYALLRHLVASQRGMWLHTDLQDALKEFREQPPEGYPEDIGWLADFVAHTQEAIFLDPWMVFAIRLRPGVWEYVRIHVEQLAVEELSTDEYLQAKEQLVKGGAEGEAVLTVDFEDFRRVSQRLKDESTIGNGLTHLNRHLAGRLWTDLAEGRSQILEFLRLHRLDGQQLMLSDRIQDFDSLRQAVQYLGTLPRDTPWAEFEPDMRRRGFEPGWGDTAGRVRETMRLLMDLLDSPSPAALEKFLARIPMISNVLIVSIHGWFAQDNVLGRPDTGGQVVYILDQARALEREMRNRLRQQGVDVEPRILIATRLIPEADGTTCDQRLEPVHGAEHVWILRVPFRYEDGRIHPHWISRFKVWPYLERFAEDLEREVKAELGGRPDLIIGNYSDGNLVATLLSEKLGVTQCNIAHALEKTKYLYSDLHWKDHEQQYHFACQFTADLIAMNAADIIVTSTYQEIAGNDNEVGQYESHQDYTLPGLYRVEHGIDVFDPKFNIVSPGADPRIYFPYSRTEERFSSLWPEIEELLFGREPGPDIRGVLEDRSKPIILSMARMDRIKNLSGLAEWYGRSSRLRELANLVIIGGHVDVQNSSDREEREEIRRMHEIMDEYQLDGQMRWIGSQLDKTRVGELYRVVADRRGVFVQPALFEAFGLTVIEAMSSGLPVFATRHGGPLEIIEDGVSGFHIDPNDPEATAEKLADFFERARERPKYWEEISDAALQRVEERYTWERYAERLMTIARCYGFWKFVLSRERQVMRRYLQMFRHLQWRPLAHAVPME

SEQ ID NO: 71 - protein, 793 aa, synthetic construct
MIEELRQQLLDHRRSWYAFLRHLVASQRGMWLHTDLQDALKTFREQPPEGYPEDIGWLADFVAHTQEAIFLDPWMVFAIRLRPGVWEYVRIHVEQLAVEELSTDEYLQAKEQLVGGGAEGEAVLTVDFEDFRPVSQRLKDESTIGDGLTHLNRHLAGRLWTDLAEGRSQILEFLRLHRLDGQNLMLSDRITDFDSLRQTVQYLGTLPRETPWAEFEPDMRRRGFEPGWGNTAGRVRETMRLLMDLLDSPSPAALESFLDRIPMISNVLIVSIHGWFAQDNVLGRPDTGGQVVYILDQARALEREMRNRLRQQGVDVEPRILIATRLIPESDGTTCDQRLEPVHGAENVHILRVPFRYEDGRIHPHWISRFKVWPYLERFAEDLEREVKAELGGRPDLIIGNYSDGNLVATLLSEKLGVTQCNIAHALEKTKYLYSDLHWKDHEQDYHFACQFTADLIAMNAADIIVTSTYQEIAGNDREVGQYESHQDYTLPGLYRVENGIDVFDPKFNIVSPGADPRIYFPYSRTEERFSSLWPEIESLLFGREPGPDIRGVLEDRQKPIILSMARMDRIKNLSGLAEWYGRSSRLRSLANLVIIGGHVDVQNSSDAEEREEIRRMHEIMDEYQLDGQMRWLGSQLDKTRVGELYRVVADRRGVFVQPALFEAFGLTVIEAMSSGLPVFATRHGGPLEIIEDGVSGFHIDPNDPEATAEKLADFFEKARERPKYWEEISDAALARVSERYTWERYAERLMTIARCYGFWKFVLSRESQVMRRYLQMFRHLQWRPLAHAVPME

SEQ ID NO: 72 - protein, 793 aa, synthetic construct
MIEELRQQLLDHRRSWYALLRHYIASQRGMWLHTDLQDELEAFREQPPEGYPGDDGWLAEFVKHTQEAIFLDPWMVFAVRERPGVWEYVRIHVEQLAVEELSVDEYLQAKEELVDGGAEGEAVLEVDFEDFRRESQRLKDESTIGNGLQHLNRHLAGRLWTDLSQGRSQILNFLRLHRLDGQQLMLSDRIQDFDSLRQALQYLGTLPRDTPWSEFAHDMQRLGFEPGWGDTAGRVRETMRLLMDLLDSPSPAALEKFLARIPMISNVLIVSIHGWFGQDNVLGRPDTGGQVVYILDQARALEREMRNRLREQGVDVEPRILIATRLIPEADGTTCDQRLEPVSGAEHVWILRVPFRYEDGRIHPHWISRFKVWPYLERFAEDLEREVLAELGGRPDLIIGNYSDGNLVATLLSEKLGVTQCNIAHALEKTKYLYSDLYWRDFEDQYHFACQFTADLIAMNAADIIITSTYQEIAGNDNEVGQYESHQAYTLPGLYRVVHGIDVFDPKFNIVSPGADPRIYFPYSRKERRFTSLHPEIEELLFGREPGPDIRGVLEDRSKPIILSMARMDRIKNLSGLAEWYGRSSRLRELANLVIIGGHVDVQNSNDREEREEIRRMHEIMDEYNLDGQMRWIGAQLDKTRVGELYRVVADRRGVFVQPALFEAFGLTVIEAMASGLPVFATRHGGPLEIIEDGVSGFHIDPNDPEAAAEKLADFFERAREDPKYWEEISQAALQRVEERYTWERYAERLMTIARCYGFWKYVTSRERQVTRRYLQMFRHLQWRPLAHAVPME

SEQ ID NO: 73 - protein, 793 aa, synthetic construct
MIEELRQQLSDHPNSWYAFLRHYVASQRGIWLHTDLQRELKTFREPPPEGYPEDIPWLADFVRHTQEAIFLDPWMYFAWRERPGVWEYVRIHVEQLAVEELSVEEYLQAKEELVDGGAEGEAVLTVDFEDFRRVSQRLKDESTIGNGLQHLNRHLAGRIWTDLSQGRSQLLEFLRLHRLDGQQLMLSDRIQDFDSLRQALQYLGTLPRDTPWSEFEEDMRRRGFEPGWGDTAGRVRETMRLLMDLLDSPSPAALEKFLDRIPMISNVLIVSIHGYFAQDNVLGRPDTGGQVVYILDQARALEREMRERLRQQGVDVEPRILIATRLIPEADGTTCDQRLEPVSGAEHVQILRVPFRYEDGEIHPHWISRFKVWPYLERFAEDLEREVLAELGGRPDLIIGNYSDGNLVATLLSEKLGVTQCNIAHALEKTKYLYSDLYWRDHEQQYHFACQFTADLIAMNAADIIITSTYQEIAGNDNEVGQYESHQDYTLPGLYRVVHGIDVFDPKFNIVSPGADPRIYFPYSRKERRFSSLHPEIEELLFGREPGPEIRGVLEDRSKPIILTMARLDRIKNLSGLAEWYGRSPRLRELANLVIIGGHVDVQNSSDREEREEIRRMHEIMDEYNLDGQMRWIGAQLDKTRVGELYRVVADRRGVFVQPALFEAFGLTVIEAMASGLPVFATRHGGPLEIIEDGVSGFHIDPNDPDQAAEKLADFFERAREDPKYWEEISQAALQRVEERYTWERYAERLMTIARVYGFWRYVSKRERQVTRRYLQMFRHLQWRPLAHAVPME

SEQ ID NO: 74 - protein, 793 aa, synthetic construct
MIEELRQQLLDNPESWRAFLRHLVASQRGLWLHTDLQRACKTFREQPPEGYPEDIGWLADFVAHTQEAIFRDPWMYFAWRLRPGVWEYVRIHVEQLAVEELSVDEYLQAKEQLVDGGAEGEAVLTVDFEDFRRVSQRLKDESTIGDGLTHLNRHLAGRIWTDLAAGRSQLLEFLRLHRHDGQNLMLSDRIQDFDSLRQALQYLGTLPRDTPWAEFREDMRRRGFEPGWGDTAGRVRETMRLLMDLLDSPSPAALEKFLDRIPMISNVLIVSIHGWFAQDNVLGRPDTGGQVVYILDQARALEREMRNRLRQQGVDVEPRILIATRLIPESKGTTCDQRLEPVHGAENVWILRVPFRYEDGRIHPHWISRFKVWPYLERFAEDLEREVKAELGGRPDLIIGNYSDGNLVATLLSEKLGVTQCNIAHALEKSKYLYSDLHWKDHEQQYHFACQFTADLIAMNAADIIVTSTYQEIAGNDNEVGQYESHQAYTLPGLYRVVHGIDVFDSKFNIVSPGADPRIYFPYSRTEERFTSLWPEIESLLFGREPGPDIRGVLEDRSKPIILSMARMDRIKNLSGLAELYGRSSRLRELANLVIIGGHVDPQNSMDAEEREEIRRMHEIMDEYQLDGQMRWVGAQLDKTRVGELYRVVADRRGVFVQPALFEAFGLTVIEAMSSGLPVFATRHGGPLEIIEDGVSGFHIDPNDPEATAEKLADFFERARERPKYWEEISDAALARVEERYTWERYAERLMTIARVYGFWKFVLSRERQVTRRYLQMFRHLQWRPLAHAVPME

SEQ ID NO: 75 - protein, 793 aa, synthetic construct
MIEELRQQLLDNPNSWRAFLRHLVASQRGLWLHTDLQRECKTFREQPPEGYPEDIGWLAEFVKHTQEAIFRDPWMYFAVRLRPGVWEYVRIHVEQLAVEELSVDEYLQAKEELVDGGAEGEAVLTVDFEDFRRVSQRLKDESTIGNGVQHLNRHLAGRIWQDLSAGRSQLLEFLRLHRHDGQNMMLSDRIQDFDSLRQALQYLGTLPRDTPWSEFREDMRRRGFEPGWGDTAGRVRETMRLLMDLLDSPSPAALEKFLDRIPMISNVLIVSIHGWFAQDNVLGRPDTGGQVVYILDQARALEREMRNRLRQQGVDVEPRILIATRLIPESKGTTCDQRLEPVSGAENVWILRVPFRGEDGRIHPHWISRFKVWPYLERFAEDLEREVLAELGGRPDLIIGNYSDGNLVATLLSEKLGVTQCNIAHALEKTKYLYSDLYWKDHEDQYHFACQFTADLIAMNAADIIITSTYQEIAGNDNEVGQYESHQAFTLPGLYRVVHGIDVFDPKFNIVSPGADPRIYFPYSRTEERFTSLWPEIEELLFGREPGPDIRGVLEDRSKPIILSMARMDRIKNLSGLAELYGRSSRLRELANLVIIGGHVDPQNSMDAEEREEIRRMHEIMDEYQLDGQMRWIGAQLDKTRVGELYRVVADRRGVFVQPALFEAFGLTVIEAMSSGLPVFATRHGGPLEIIEDGVSGFHIDPNDPEAAAEKLADFFERAREDPKYWEEISDAALQRVYERYTWERYAERLMTIARVYGFWKYVLSRERQVTRRYLQMFRHLQWRPLAHAVPME

SEQ ID NO: 76 - protein, 793 aa, synthetic construct
MIEELRQQLLDNPDSWRAFLRHLVASQRGLWLHTDLQRACKTFREQPPEGYPEDIGWLADFVAHTQEAIFRDPWMYFAWRLRPGVWEYVRIHVEQLAVEELSVDEYLQAKEQLVDGGAEGEAVLTVDFEDFRRVSQRLKDESTIGDGLTHLNRHLAGRIWTDLAAGRSQILEFLRLHRHDGQVLMLSDRIQDFDSLRQTLQYLGTLPRETPWAEFREDMRRRGFEPGWGNTAGRVRETMRLLMDLLDSPSPAALESFLDRIPMISNVLIVSIHGWFAQDNVLGRPDTGGQVVYILDQARALEREMRNRLRQQGVDVEPRILIATRLIPESDGTTCDQRLEPVHGAENVWILRVPFRYEDGRIHPHWISRFKVWPYLERYAEDLEREVKAELGGRPDLIIGNYSDGNLVATLLSEKLGVTQCNIAHALEKSKYLYSDLHWPDHEQDYHFACQFTADLIAMNAADIIVTSTYQEIAGNDNEVGQYESHQAYTLPGLYRVEHGIDVFDSKFNIVSPGADPRIYFPYSRTEERFTSLWPEIESLLFGREPGPDIRGVLEDRSKPIILSMARMDRIKNLSGLAELYGRSSRLRELANLVIIGGHVDPQNSMDAEEREEIRRMHEIMDEYQLDGQMRWVGSQLDKTRVGELYRVVADRRGVFVQPALFEAFGLTVIEAMSSGLPVFATRHGGPLEIIEDGVSGFHIDPNDPEATAEKLADFFERARERPKYWEEISDAALARVSERYTWERYAERLMTIARVYGFWKFVLSRERQVTERYLQMFRHLQWRPLAHAVPME

SEQ ID NO: 77 - protein, 793 aa, synthetic construct
MIEELRQQLLDNPDEWRAFLRHLVASQRGLWLHHDLQRECETFREQPPEGYPEGQGWLAEFVKHTQEAIFRDPWMYFAWRERPGVWEYVRIHVEQLTVEELSVDEYLQAKEELVDGGAEGEAVLEVDFEDFRRSSQRLKDESTIGNGVQHLNRHLAGRIWQDLSAGRSQLLEFLRLHRHDGQQMMLSDRIQDFDSLRQALQYLGTLPRDTPWSEFEEDMRRRGFEPGWGDTAGRVRETMRLLMDLLDSPSPAALEKFLDRIPMISNVLIVSIHGWFGQDNVLGRPDTGGQVVYILDQARALEREMRRRLRQQGVDVEPRILIATRLIPEAKGTTCDQRLEPVSGAEHVWILRVPFRDEDGRIVPHWISRFKVWPYLERFAEDLEREVLAELGGRPDLIIGNYSDGNLVATLLSEKLGVTQCNIAHALEKTKYLYSDLYWKDHEDQYHFACQFTADLIAMNAADIIITSTYQEIAGNDNEVGQYESHQAYTLPGLYRVVHGIDVFDPKFNIVSPGADPRIYFPYSRKEKRFTSLHPEIEELLFGREPGPEHRGVLEDRSKPIILSMARMDRIKNLSGLAELYGRSSRLRELANLVIIGGHVDPKNSGDREEREEIRRMHEIMDEYNLDGQMRWIGAQLDKTRVGELYRVVADRRGVFVQPALFEAFGLTVIEAMASGLPVFATRHGGPLEIIEDGVSGFHIDPNDPEQAAEKLADFFERAREDPKYWEEISQAALQRVEERYTWERYAERLMTIARVYGFWKYVLKRERQVTRRYLQMFRHLQWRPLAHAVPME

SEQ ID NO: 78 - protein, 793 aa, synthetic construct
MIEELRQQLSDSRRAWYAFLRHLVASQRGLWLHTDLQRECETFREQPPEGYPEDGGWLADFVKHTQEAIFQDPWMVFAWRLRPGVWEYVRIHVEQLAVEELSVDEYLQAKEQLVDGGAEGEAVLTVDFEDFRPVSQRLKDESTIGNGLQHLNRHLAGRIWTDLAEGRSQLLEFLRLHRLDGQQLMLSDRIQDFDSLRQAVQYLGTLPRDTPWSEFREDMRRRGFEPGWGDTAGRVRETMRLLMDLLDSPSPAALEKFLDRIPMISNVLIVSIHGWFAQDNVLGRPDTGGQVVYILDQARALEREMRERLRQQGVDVEPRILIATRLIPESDGTTCDQRLEPVSGTEHVHILRVPFRYEDGEIHPHWISRFKVWPYLERYAEDLEREVLAELGGRPDLIIGNYSDGNLVATLLSEKLGVTQCNIAHALEKTKYLYSDLHWKDHEDQYHFACQFTADLIAMNAADIIITSTYQEIAGNDNEVGQYESHQDYTLPGLYRVVHGIDVFDPKFNIVSPGADPRIYFPYSRTEERFSSLHPEIEELLFGREPGPDHRGVLEDRSKPIILSMARMDRIKNLSGLAEWYGRSSRLRELANLVIIGGHVDVQNSMDREEREEIERMHEIMDEYQLDGQMRWVGAQLDKTRVGELYRYVADRRGVFVQPALFEAFGLTVIEAMSSGLPVFATRHGGPAEIIEDGVSGFHIDPNDPDATAEKLADFFERAREDPKYWEEISQAALQRVEERYTWERYAERLMTIARCYGFWRYVSSRERQVMERYLQMFRHLQWRPLAHAVPME

SEQ ID NO: 79 - protein, 793 aa, synthetic construct
MIEELRQQLLDSPRSWRAFLRHLVASQRGFWLHTDLQRACKTFREQPPEGYPEDIGWLADFVAHTQEAIFHDPWMVFAWRLRPGVWEYVRIHVEQLAVEELSVDEYLQAKEQLVGGGAEGEAVLTVDFEDFRPVSQRLKDESTIGDGLTHLNRHLAGRIWTDLAAGRSQILEFLRLHRLDGQQLMLSDRIQDFDSLRQAVQYLGTLPRETPWAEFREDMRRRGFEPGWGNTAGRVRETMRLLMDLLDSPSPAALESFLDRIPMISNVLIVSIHGWFAQDNVLGRPDTGGQVVYILDQARALEREMRNRLRQQGVDVEPRILIATRLIPESDGTTCDQRLEPVHGTENVHILRVPFRYEDGEIHPHWISRFKVWPYLERYAEDLEREVKAELGGRPDLIIGNYSDGNLVATLLSEKLGVTQCNIAHALEKSKYLYSDLHWKDHEQDYHFACQFTADLIAMNAADIIVTSTYQEIAGNDREVGQYESHQDYTLPGLYRVENGIDVFDPKFNIVSPGADPRIYFPYSRTEERFSSLHPEIESLLFGREPGPDIRGVLEDRQKPIILSMARMDRIKNLSGLAEWYGRSSRLRELANLVIIGGHVDVQNSMDAEEREEIRRMHEIMDEYQLDGQMRWVGSQLDKTRVGELYRVVADRRGVFVQPALFEAFGLTVIEAMSSGLPVFATRHGGPLEIIEDGVSGFHIDPNDPEATAEKLADFFERARERPKYWEEISDAALARVSERYTWERYAERLMTIARCYGFWRFVSSRESQVMERYLQMFRHLQWRPLAHAVPME

SEQ ID NO: 80 - protein, 793 aa, synthetic construct
MIEELRQQLSDSRRAWYAFLRHYVASQRGLWLHTDLQREFETFREQPPEGYPEDGGWLAEFVKHTQEAIFQDPWMVFAWRLRPGVWEYVRIHVEQLVVEELSVDEYLQAKEQLVDGGPEGEAVLEVDFEDFRRVSQRLKDESTIGNGLQHLNRHLAGRIWGDLRQGMSQLLEFLRLHRLDGQQLMLSDRIQDFDSLRRALQYLGTLPRDTPWSEFEEDMRRLGFEPGWGDTAGRVRETMRLLMDLLDSPSPATLEKFLDRIPMISNVLIVSIHGYFGQDNVLGRPDTGGQVVYILDQARALEREMRERLRQQGVDVEPRILIATRLIPEADGTTCDQRLEPVSGTEHVHILRVPFRYENGEIHPHWISRFKVWPYLERFAEDLEREVLAELGGRPDLIIGNYSDGNLVATLLSEKLGVTQCNIAHALEKTKYLYSDLYWKDFEDQYHFACQFTADLIAMNAADIIITSTYQEIAGNDNEVGQYESHQDYTLPGLYRVVHGIDVFDPKFNIVSPGADPRIYFPYSRKERRFSSLHPEIEELLFGREPGPDHRGVLEDRSKPIILSMARMDRIKNLSGLAEWYGRSPRLRELANLVIIGGHVDVKNSNDREEREEIERMHEIMDEYQLDGQMRWVGAQLDKTRVGELYRYVADRRGVFVQPALFEAFGLTVIEAMASGLPVFATRHGGPAEIIEDGVSGFHIDPNDPDAAAEKLADFFERAREDPKYWEEISQAALQRVYERYTWERYAERLMTIARCYGFWKYVTKRERQVTERYLQMFRHLQWRPLAHAVPME

SEQ ID NO: 81 - protein, 793 aa, synthetic construct
MIEELRQQLSDSPRSWYAFLRHLVASQRGFWLHTDLQRECKTFREQPPEGYPEDGGWLADFVAHTQEAIFHDPWMVFAWRLRPGVWEYVRIHVEQLAVEELSVDEYLQAKEQLVDGGAEGEAVLTVDFEDFRPVSQRLKDESTIGNGLTHLNRHLAGRIWTDLAEGRSQILEFLRLHRLDGQQLMLSDRIQDFDSLRQAVQYLGTLPRDTPWAEFREDMRRRGFEPGWGDTAGRVRETMRLLMDLLDSPSPAALEKFLDRIPMISNVLIVSIHGWFAQDNVLGRPDTGGQVVYILDQARALEREMRNRLRQQGVDVEPRILIATRLIPESDGTTCDQRLEPVHGTEHVHILRVPFRYEDGEIHPHWISRFKVWPYLERYAEDLEREVKAELGGRPDLIIGNYSDGNLVATLLSEKLGVTQCNIAHALEKTKYLYSDLHWKDHEQQYHFACQFTADLIAMNAADIIVTSTYQEIAGNDNEVGQYESHQDYTLPGLYRVVHGIDVFDPKFNIVSPGADPRIYFPYSRTEERFSSLHPEIESLLFGREPGPDIRGVLEDRSKPIILSMARMDRIKNLSGLAELYGRSSRLRELANLVIIGGHVDVQNSMDAEEREEIRRMHEIMDEYQLDGQMRWVGAQLDKTRVGELYRVVADRRGVFVQPALFEAFGLTVIEAMSSGLPVFATRHGGPLEIIEDGVSGFHIDPNDPEATAEKLADFFERARERPKYWEEISDAALQRVEERYTWERYAERLMTIARCYGFWRFVSSRERQVMERYLQMFRHLQWRPLAHAVPME

SEQ ID NO: 82 - protein, 793 aa, synthetic construct
MIEELRQQLLDHPREWYAFLRHLVASQRGMWLHHDLQRECKEFREQPPEGYPEDIGWLAEFVEHTQEAIFRDPWMVFAWRLRPGVWEYVRIHVEQLAVEELSVDEYLQAKEELVDGGAEGEAVLEVDFEDFRRVSQRLKDESTIGNGLEHLNRHLAGRLWTDLARGLEQILEFLRLHRLDGQQLMLSDRIQDFDSLRQAVQYLGTLPPETPWSEFEEDMRRLGFEPGWGDTAGRVRETMRLLMDLLDSPSPAALEKFLDRIPMISNVLIVSIHGYFAQDNVLGRPDTGGQVVYILDQARALEREMRNRLRQQGVDVEPRILIATRLIPEADGTTCDQRLEPVHGTENVHILRVPFRYEDGRIHPHWISRFKVWPYLERFAEDLEREVLAELGGRPDLIIGNYSDGNLVATLLSEKLGVTQCNIAHALEKTKYLYSDLYWKDYEDQYHFACQFTADLIAMNAADIIITSTYQEIAGTDNEVGQYESHQAYTLPGLYRVVNGIDVFDPKFNIVSPGADPRIYFPYTRTERRFSSLHPEIERLLFGREPGPDIRGVLEDRSKPIILTMARMDRIKNLSGLAEWYGRSSRLRSLANLVIIGGHVDVQNSMDAEEREEIRRMHEIMDEYQLDGQMRWIGAQLDKTRVGELYRVVADTRGVFVQPALFEAFGLTVIEAMSSGLPVFATRHGGPLEIIEDGVSGFHIDPNDPDAVAEKLADFFERAREDPKYWEEISDAALKRVRERYTWERYAERLMTIARVYGFWRFVTKRERQVTRRYLQMFRHLQWRPLAHAVPME

SEQ ID NO: 83 - protein, 793 aa, synthetic construct
MIEELRQQLLDHPRSWYAFLRHLVASQRGMWLHTDLQRECKEFREQPPEGYPEDIGWLADFVAHTQEAIFRDPWMVFAWRLRPGVWEYVRIHVEQLAVEELSVDEYLQAKEQLVDGGAEGEAVLEVDFEDFRRVSQRLKDESTIGNGLTHLNRHLAGRIWTDLAAGRSQILEFLRLHRLDGQQLMLSDQITDFDSLRQAVQYLGTLPPETPWAEFEEDMRRLGFEPGWGDTAGRVRETMRLLMDLLDSPSPAALEKFLDRIPMISNVLIVSIHGWFAQDNVLGRPDTGGQVVYILDQARALEREMRNRLRQQGVDVEPRILIATRLIPEADGTTCDQRLEPVHGTENVHILRVPFRYEDGRIHPHWISRFKVWPYLERYAEDLEREVKAELGGRPDLIIGNYSDGNLVATLLSEKLGVTQCNIAHALEKTKYLYSDLHWKDHEQQYHFACQFTADLIAMNAADIIITSTYQEIAGTDNEVGQYESHQAYTLPGLYRVVNGIDVFDPKFNIVSPGADPRIYFPYSRTEERFSSLHPEIESLLFGREPGPDIRGVLEDRSKPIILSMARMDRIKNLSGLAEWYGRSSRLRSLANLVIIGGHVDVQNSMDAEEREEIRRMHEIMDEYQLDGQMRWIGAQLDKTRVGELYRVVADTRGVFVQPALFEAFGLTVIEAMSSGLPVFATRHGGPLEIIEDGVSGFHIDPNDPEAVAEKLADFFERARERPKYWEEISDAALARVSERYTWERYAERLMTIARVYGFWRFVTSRERQVTRRYLQMFRHLQWRPLAHAVPME

SEQ ID NO: 84 - protein, 793 aa, synthetic construct
MIEELRQQLLDHPRSWRAFLRHLVASQRGMWLHTDLQHACKTFREQPPEGYPEDIGWLADFVEHTQEAIFRDPWMVFAWRLRPGVWEYVRIHVEQLAVEELSVDEYLQAKEQLVDGGAEGEAVLEVDFEDFRRVSQRLKDESTIGNGLTHLNRHLAGRIWTDLAAGRSQILEFLRLHRLDGQNLMLSDQITDFDSLRQAVQYLGTLPPETPWAEFEEDMRRLGFEPGWGNTAGRVRETMRLLMDLLDSPSPAALESFLDRIPMISNVLIVSIHGWFAQDNVLGRPDTGGQVVYILDQARALEREMRNRLRQQGVDVEPRILIATRLIPESDGTTCDQRLEPVHGAENVYILRVPFRYEDGRIHPHWISRFKVWPYLERYAEDLEREVKAELGGRPDLIIGNYSDGNLVATLLSEKLGVTQCNIAHALEKTKYLYSDLHWKDHEQDYHFACQFTADLIAMNAADIIVTSTYQEIAGTDREVGQYESHQAYTLPGLYRVVNGIDVFDPKFNIVSPGADPRIYFPYRRTEERFSSLHPEIESLLFGREPGPDIRGVLEDRQKPIILSMARMDRIKNLSGLAEWYGRSSRLRSLANLVIIGGHVDVQNSMDAEEREEIRRMHEIMDEYQLDGQMRWIGSQLDKTRVGELYRVVADTRGVFVQPALFEAFGLTVIEAMSSGLPVFATRHGGPLEIIEDGVSGFHIDPNDPEATAEKLADFFERARERPKYWEEISDAALARVSERYTWERYAERLMTIARVYGFWRFVTSRERQVTRRYLQMFRHLQWRPLAHAVPME

SEQ ID NO: 85 - protein, 793 aa, synthetic construct
MIEELRQQLLDSRRSWRAFLRHLVASQRGLWLHTDLQRACKTFREQPPEGYPEDIGWLADFVAHTQEAIFRDPWMVFAWRLRPGVWEYVRIHVEQLAVEELSTDEYLQAKEQLVGGGAEGEAVLTVDFEDFRPVSQRLKDESTIGDGLTHLNRHLAGRIWTDLAAGRSQILEFLRLHRLDGQNLMLSDRITDFDSLRQALQYLGTLPRETPWAEFEEDMRRLGFEPGWGNTAGRVRETMRLLMDLLDSPSPAALESFLARIPMISNVLIVSIHGWFAQDNVLGRPDTGGQVVYILDQARALEREMRNRLRQQGVDVEPRILIATRLIPESDGTTCDQRLEPVHGTENVQILRVPFRNEDGRIHPHWISRFKVWPYLERYAEDLEREVKAELGGRPDLIIGNYSDGNLVATLLSEKLGVTQCNIAHALEKSKYLYSDLHWKDHEQDYHFACQFTADLIAMNAADIIVTSTYQEIAGNDNEVGQYESHQDYTLPGLYRVVNGIDVFDPKFNIVSPGADPRIYFPYSRTEERFSSLWPEIESLLFGREPGPDIRGVLEDRQKPIILSMARMDRIKNLSGLAEWYGRSSRLRSLANLVIIGGHVDVQNSMDAEEREEIRRMHEIMDHYQLDGQMRWVGSQLDKTRVGELYRVVADTRGVFVQPALFEAFGLTVIEAMSSGLPVFATRHGGPLEIIEDGVSGFHIDPNDPDATAEKLADFFERARERPKYWEEISDAALARVSERYTWERYAERLMTIARVYGFWRFVLSRERQVMERYLQMFRHLQWRPLAHAVPME

SEQ ID NO: 86 - protein, 793 aa, synthetic construct
MIEELRQQLLDHPNSWYAFLRHLVASQRGLWLHHDLQRECKTFREQPPEGYPETIGWLADFVEHTQEAIFRDPWMVFALRLRPGVWEYVRIHVEQLAVEELSVDEYLQAKEQLVDGGAEGEAVLTVDFEDFRRNSQRLKDESTIGNGLEHLNRHLAGRIWTDLAEGRSQILEFLRLHRLDGQQLMLSDRIQDFDSLRQAVQYLGTLPRDTPWSEFREEMRRRGFEPGWGDTAGRVRETMRLLMDLLDSPSPAALEKFLDRIPMISNVLIVSIHGWFAQDNVLGRPDTGGQVVYILDQARALEREMRERLRQQGVDVEPRILIATRLIPEADGTTCDQRLEPVSGAENVWILRVPFRYEDGRIHPHWISRFKVWPYLERFAEDLEREVLAELGGRPDLIIGNYSDGNLVATLLSEKLGVTQCNIAHALEKTKYLYSDLYWKDHEDQYHFACQFTADLIAMNAADIIVTSTYQEIAGNDREVGQYESHQDYTLPGLYRVVNGIDVFDPKFNIVSPGADPRIYFPYSRTEERFSSLWPEIEELLFGREPGPDIRGVLEDRSKPIILSMARMDRIKNLSGLAEWYGRSSRLRSLANLVIIGGHVDVQNSSDREEREEIRRMHEIMDEYQLDGQMRWIGSQLDKTRVGELYRVVADRRGVFVQPALFEAFGLTVIEAMTSGLPVFATRHGGPLEIIEDGVSGFHIDPNDPDATAEKLADFFERAREDPKYWEEISQAALQRVYERYTWERYAERLMTIARVYGFWRFVTSRERQVMERYLQMFRHLQWRPLAHAVPME

SEQ ID NO: 87 - protein, 793 aa, synthetic construct
MIEELRQQLLDHPNSWYAFLRHLVASQRGLWLHHDLQRECKTFREQPPEGYPETIGWLADFVAHTQEAIFRDPWMVFAVRLRPGVWEYVRIHVEQLAVEELSVDEYLQAKEQLVDGGAEGEAVLTVDFEDFRRHSQRLKDESTIGNGLTHLNRHLAGRIWTDLAAGRSQILEFLRLHRLDGQQLMLSDRITDFDSLRQTVQYLGTLPRDTPWAEFREDMRRRGFEPGWGDTAGRVRETMRLLMDLLDSPSPAALEKFLDRIPMISNVLIVSIHGWFAQDNVLGRPDTGGQVVYILDQARALEREMRNRLRQQGVDVEPRILIATRLIPEADGTTCDQRLEPVHGAENVWILRVPFRYEDGRIHPHWISRFKVWPYLERYAEDLEREVKAELGGRPDLIIGNYSDGNLVATLLSEKLGVTQCNIAHALEKSKYLYSDLHWKDHEQQYHFACQFTADLIAMNAADIIVTSTYQEIAGNDREVGQYESHQDYTLPGLYRVVNGIDVFDPKFNIVSPGADPRIYFPYSRTEERFSSLWPEIEELLFGREPGPDIRGVLEDRSKPIILSMARMDRIKNLSGLAEWYGRSSRLRSLANLVIIGGHVDVQNSSDAEEREEIRRMHEIMDEYQLDGQMRWIGSQLDKTRVGELYRVVADRRGVFVQPALFEAFGLTVIEAMTSGLPVFATRHGGPLEIIEDGVSGFHIDPNDPEATAEKLADFFERARERPKYWEEISDAALQRVEERYTWERYAERLMTIARVYGFWRFVTSRERQVMERYLQMFRHLQWRPLAHAVPME

SEQ ID NO: 88 - protein, 793 aa, synthetic construct
MIEELRQQLLDHPNSWRAFLRHLVASGRDSWLHHDLQDACKTFREQPPEGYPEDIGPLADFVAHTQEAIFRDPWMYFAWRLRPGVWEYVRIHVEQLAVEELSTDEYLQFKEQLVNGGAEGEAVLTVDFEDFRPGFQRLKDESTIGNGLTHLNRHLAGRIWTDLGAGRSKILEFLGLHRLDGQQLMLSDGNTDFDSLRQAVQYLGTLPPDTPWAEFEEDMQRMGFEPGWGDTAGRVRETMRLLMDLLDSPSPAALEEFLARIPMISNVLIVSIHGWFAQDNVLGRPDTGGQVVYILDQARALEREMRERLRQQGVDVEPRILIATRLIPESDGTTCDQRLEPVHGAENVWILRVPFRYEDGRIHPHWISRFKVWPYLERYAEDLEREVLAELGGRPDLIIGNYSDGNLVATLLSEKLGVTQCNIAHALEKSKYLYSDLHWKDHEQQYHFACQFTADLIAMNAADIIITSTYQEIAGNDREVGQYESYQAYTLPGLYRVVNGIDVFDSKFNIVSPGADPSIYFSYSETEERFSSLHPEIEELLFGREPGPPIRGVLSDRDKPIILSMARMDRIKNLTGLAELYGRSPRLRELANLVIIGGHVDVQNSMDAEEREEIRRMHEIMDKYQLDGQMRWIGSQLDKTRVGELYRVVADRRGVFVQPALFEAFGLTVIEAMSSGLPVFATRHGGPLEIIEDGVSGFHIDPNDPDAAAEKLADFLEAARERPKYWEKISDAALQRVRERYTWERYAERLMTLARVYGFWRFVSKRERQVMRRYLQMFRHLQWRPLAHAVPME

SEQ ID NO: 89 - protein, 793 aa, synthetic construct
MIEELRQQLLDHPNSWRAFLRHLVASGRDSWLHTDLQRACKTFREQPPEGYPEDIGPLADFVAHTQEAIFRDPWMYFAWRLRPGVWEYVRIHVEQLAVEELSTDEYLQAKEQLVTGGAEGEAVLTVDFEDFRPGFQRLKDESTIGNGLTHLNRHLAGRIWTDLGAGRSQILEFLGLHRLDGQQLMLSDGNTDFDSLRQTVQYLGTLPPETPWAEFREDMRRMGFEPGWGDTAERVRETMRLLMDLLDSPSPAALESFLARIPMISNVLIVSIHGWFAQDNVLGRPDTGGQVVYILDQARALEREMRNRLRQQGVDVEPRILIATRLIPESDGTTCDQRLEPVHGAENVWILRVPFRYEDGRIHPHWISRFKVWPYLERYAEDLEREVLAELGGRPDLIIGNYSDGNLVATLLSEKLGVTQCNIAHALEKSKYLYSDLHWKDHEQQYHFACQFTADLIAMNAADIIITSTYQEIAGNDREVGQYESHQDYTLPGLYRVVNGIDVFDSKFNIVSPGADPSIYFSYSETEERFSSLHPEIEELLFGREPGPPIRGVLEDRDKPIILSMARMDRIKNLTGLAELYGRSSRLRELANLVIIGGHVDVQNSMDAEEREEIRRMHEIMDKYQLDGQMRWVGSQLDKTRVGELYRVVADRRGVFVQPALFEAFGLTVIEAMSSGLPVFATRHGGPLEIIEDGVSGFHIDPNDPDATAEKLADFLEAARERPKYWEEISDAALARVEERYTWERYAERLMTLARVYGFWRFVSSRERQVMRRYLQMFRHLQWRPLAHAVPME

SEQ ID NO: 90 - protein, 793 aa, synthetic construct
MIEELRQQLLDSPNSWRAFLRHLVASGRDIWLHHDLQRACKDFREQPPEGYPEDISWLADFVAHTQEAIVRDPWVVFAWRERPGVWEYVRIHVEQLVVEELSTDEYLQFKEQLVGGGAEGEAVLTVDFEDFRPGVQRLKDESTIGNGLTHLNRHLAGRIWTDLGKGRSKILEFLSLHRLDGQQLMLSNRNTDFDSLRQTLQYLGTLPRDTPWAEFREDMRRRGFEPGWGRTAGRVRETMRLLMDLLDSPSPAALESFLARIPMISNVLIVSIHGWFAQDNVLGRPDTGGQVVYILDQARALEREMRRRLRQQGVDVEPRILIATRLIPESDGTTCDQRLEPVSGTENVWILRVPFRYEDGRIHPHWISRFKVWPYLERYAEDLEREVLAELGGRPDLIIGNYSDGNLVATLLSEKLGVTQCNIAHALEKSKYLYSDLHWKDFEQQYHFACQFTADLIAMNAADIIITSTYQEIAGNDREVGQYESYQDYTLPGLYRVVNGIDVFDSKFNIVSPGADPSIYFSYSRTEERFTSLHPEIEELLFGREPGPDIRGVLEDRDKPIILSMARMDRIKNLSGLAEWYGRSSRLRELANLVIIGGHVDVQNSMDAEEREEIRRMHEIMDEYQLDGQMRWVGSQLDKTRVGELYRYVADHRGVFVQPALFEAFGLTVIEAMASGLPVFATRHGGPLEIIEHGVSGFHIDPNDPEATAEKLADFLERARERPKYWEKISDAALQRVRERYTWERYAERLMTIARCFGFWRFVSKRERQVTRRYLQMFRHLQWRPLAHAVPME

SEQ ID NO: 91 - protein, 793 aa, synthetic construct
MIEELRQQLTDSPNAWRAFLRHLVASGRDFWLHHDLQRACEDFREQPPEGYPEDISWLAEFVRHAQEAIVRDPWVVFAWRERPGVWEYVRIHVEQLVVEELSTDEYLQFKEQLVQGGAEGEAVLEVDFEDFRPGVQRLKDESTIGNGLEHLNRHLAGRMWQDLGKGRSKLLEFLSLHRLDGQQLMLSDRIQDFDSLRQTLQYLGTLPEDTPWSEFEEDMRRRGFEPGWGRTAGRVRETMRLLMDLLDSPSPSALEKFLARIPMISNVLIVSIHGWFAQDNVLGRPDTGGQVVYILDQARALEREMRRRLREQGVDVEPRILIATRLIPDADGTTCDQRLEPVSGTENVHILRVPFRYEDGRIHPHWISRFKVWPYLERFAEDLEREVLAELGGRPDLIIGNYSDGNLVATLLSEKLGVTQCNIAHALEKSKYLYSDLYWKDFEQQYHFACQFTADLIAMNAADIIITSTYQEIAGNDNEVGQYESYQDYTLPGLYRVVNGIDVFDSKFNIVSPGADPSIYFSYSRTEERFTSLHPEIEELLFGREPGPDIRGVLEDRDKPIILSMARMDRIKNLSGLAEWYGRSSRLRELANLVIIGGYVDVKKSMDREEREEIRRMHEIMDEYNLDGQMRWVGSQLDKTRVGELYRYVADHRGVFVQPALYEAFGLTVIEAMASGLPVFATRHGGPLEIIEHGVSGFHIDPNQPDQTAELLADFLERARERPKYWEKISQAALQRVRERYTWERYAERLMTIARCFGFWRFVSKRERQVTRRYLQMFRHLQWRPLAHAVPME

SEQ ID NO: 92 - protein, 793 aa, synthetic construct
MIEELRQQLLDHPNEWRAFLRHLVASGRDMWLHTDLWRACKDFREQPPEGYPEDIGWLADFVRHTQEAIFRDPWMVFAWRLRPGVWEYVRIHVEQLAVEELSTDEYLQFKEQLVDGGAEGEAVLTVDFEDFRPGFQRLKDESTIGNGLEHLNRHLAGRMWTDLGAGRSQILEFLGLHRLDGQQLMLSNRNTDFDSLRQTVQYLGTLPEETPWAEFREDMRRRGFEPGWGNTAGRVRETMRLLMDLLDSPSPAALESFLARIPMISNVLIVSIHGWFAQDNVLGRPDTGGQVVYILDQARALEREMRNRLRQQGVDVEPRILIATRLIPESDGTTCDQRLEPVHGTENVQILRVPFRYEDGNIHPHWISRFKVWPYLERYAEDLEREVKAELGGRPDLIIGNYSDGNLVATLLSEKLGVTQCNIAHALEKSKYLYSDLHWPDHEQQYHFACQFTADLIAMNAADIIITSTYQEIAGNDREVGQYESHQHYTLPGLYRVVNGIDVFDPKFNIVSPGADPRIYFSYSRTEERFSSLWPEIEELLFGREPGPPIRGVLEDRDKPIILSMARLDRIKNLTGLAEWYGRSSRLRELANLVIIGGHVDVQNSTDREEREEIRRMHEIMDEYQLDGQMRWVGSQLDKTRVGELYRYVADGRGVFVQPALFEAFGLTVIEAMSSGLPVFATRHGGPLEIIEDGVSGFHIDPNDPEATAEKLADFLEAARERPKYWEKISDAALARVEERYTWERYAERLMTLARVYGFWRFVSSRERQVTRRYLQMFRHLQWRPLAHAVPME

SEQ ID NO: 93 - protein, 793 aa, synthetic construct
MIEELRQQLLDHPNEWRAFLRHLVASGRDMWLHTDLWRACKTFREQPPEGYPEDIGWLADFVAHTQEAIFRDPWMVFAWRLRPGVWEYVRIHVEQLAVEELSTDEYLQFKEQLVDGGAEGEAVLTVDFEDFRPGFQRLKDESTIGNGLEHLNRHLAGRIWTDLGAGRSQILEFLRLHRLDGQQLMLSNGNTDFDSLRQTVQYLGTLPEETPWAEFREDMRRRGFEPGWGNTAGRVRETMRLLMDLLDSPSPAALESFLARIPMISNVLIVSIHGWFAQDNVLGRPDTGGQVVYILDQARALEREMRNRLRQQGVDVEPRILIATRLIPESDGTTCDQRLEPVHGTENVQILRVPFRYEDGRIHPHWISRFKVWPYLERYAEDLEREVKAELGSRPDLIIGNYSDGNLVATLLSEKLGVTQCNIAHALEKSKYLYSDLHWPDHEQQYHFACQFTADLIAMNAADIIVTSTYQEIAGNDREVGQYESHQDYTLPGLYRVVNGIDVFDPKFNIVSPGADPRIYFSYSRTEERFSSLWPEIEELLFGREPGPPIRGVLEDRQKPIILSMARMDRIKNLTGLAEWYGRSSRLRELANLVIIGGHVDVQNSTDAEEREEIRRMHEIMDHYQLDGQMRWVGSQLDKTRVGELYRVVADGRGVFVQPALFEAFGLTVIEAMSSGLPVFATRHGGPLEIIEDGVSGFHIDPNDPEATAEKLADFLEAARERPKYWEEISDAALARVSERYTWERYAERLMTLARVYGFWRFVSSRERQVMRRYLQMFRHLQWRPLAHAVPME

SEQ ID NO: 94 - protein, 793 aa, synthetic construct
MIEELRQQLLDHPDSWRAFLRHLVASQRDIWLHTDLQRACKTFREQPPEGYPEDIGWLADFVAHTQEAIFRDPWMYFAWRLRPGVWEYVRIHVEQLAVEELSTDEYLQFKEQLVDGGAEGEAVLTVDFEDFRPGFQRLKDESTIGNGLTHLNRHLAGRIWTDLGAGRSQILEFLGLHRLDGQNLMLSNRNTDFDSLRQAVQYLGTLPDETPWAEFREDMRRRGFEPGWGNTAGRVRETMRLLMDLLDSPSPAALESFLARIPMISNVLIVSIHGWFAQDNVLGRPDTGGQVVYILDQARALEREMRNRLRQQGVDVEPRILIATRLIPESDGTTCDQRLEPVHGTENVQILRVPFRYEDGRIHPHWISRFKVWPYLERFAEDLEREVKAELGSRPDLIIGNYSDGNLVATLLSEKLGVTQCNIAHALEKSKYLYSDLHWPDHEQDYHFACQFTADLIAMNAADIIVTSTYQEIAGNDREVGQYESHQDYTLPGLYRVVNGIDVFDSKFNIVSPGADPRIYFSYSRTEERFSSLHPEIESLLFGREPGPDHRGVLEDRDKPIILSMARMDRIKNLSGLAEWYGRSSRLRSLANLVIIGGHVDVQNSSDAEEREEIRRMHEIMDEYQLDGQMRWVGSQLDKTVVGELYRVVADGRGVFVQPALFEAFGLTVIEAMSSGLPVFATRHGGPLEIIEDGVSGFHIDPNDPEATAEKLADFLEAARERPKYWEEISDAALARVSERYTWERYAERLMTIARVYGFWRFVLSRERQVTERYLQMFRHLQWRPLAHAVPME

SEQ ID NO: 95 - protein, 793 aa, synthetic construct
MIEELRQQLLQHRDAWRAFLRHLVAQGRDIWLHHDLQDACKDFREQPPEGYPEDISWLAEFVAHTQEAIFRDPWMYFAWRLRPGVWEYVRIHVEQLTVEELSTSEYLQFKEQLVDGNAEGNAVLTVDFEDFRPGFQRLKDESTIGNGLQHLNRHLAGRMWQDLGKGREKLLEFLGLHRLDGQQLMLSDRNQDFDSLRRAVQYLGTLPDDTPWSEFREDMQRLGFEPGWGDTAGRVRETMRLLMDLLDSPSPSALEKFLARIPMISNVLIVSIHGWFAQDNVLGRPDTGGQVVYILDQARALEREMRERLRQQGVDVEPRILIATRLIPDADGTTCDQRLEPVSGTENVQILRVPFRYEDGRIHPHWISRFKVWPYLERFAEDLEREVLAELGGRPDLIIGNYSDGNLVATLLSEKLGVTQCNIAHALEKSKYLYSDLYWKDHEQQYHFACQFTADLIAMNAADIIITSTYQEIAGNDREVGQYESHQDYTLPGLYRVVNGIDVFDSKFNIVSPGADPRIYFSYSDTEERLSSLHPEIEKLLFGREPGPDHRGVLEDRDKPIILSMARMDRIKNLTGLAEWYGRSSRLRELANLVIIGGHVDVQKSSDREEQEEIRRMHEIMDEYNLDGQMRWVGSQLDKTRVGELYRYVADRRGVFVQPALYEAFGLTVIEAMASGLPVFATRHGGPLEIIEDGVSGFHIDPNQPDQTAEKLADFLEAARERPSYWEKISQAALKRVRERYTWERYAERLMTLARVYGFWRFVSSRERQVTRRYLQMFRHLQWRPLAHAVPME

SEQ ID NO: 96 - protein, 793 aa, synthetic construct
MIEELRQQLSDHPREWRAFLRHLVASQRPSWLHHDLQRACKDFREQPPEGYPEDIGWLADFVAHTQEAIFRDPWMVFAWRERPGVWYYVRIHVEQLAVEELSVDEYLQFKEQLVGLGAEGEAVLKVDFEDFRPGSQRLKDESTIGDGLTHLNRHLAGRIWTDLGAGRSQILEFLSLHRLDGQQLMLSNRNTDFDSLRQTLQYLGTLPRETPWAEFREDMRRRGFEPGWGDTAGRVRETMRLLMDLLDSPSPAALESFLARIPMISNVLIVSIHGWFAQDNVLGRPDTGGQVVYILDQARALEREMRERLRQQGVDVEPRILIATRLIPESDGTTCDQRLEPVHGTENVWILRVPFRYEDGRIHPHWISRFKVWPYLERYAEDLEREVKAELGGRPDLIIGNYSDGNLVATLLSEKLGVTQCNIAHALEKSKYLYSDLHWKDHEQQYHFACQFTADLIAMNAADIIVTSTYQEIAGNDREVGQYESHQDFTLPGLYRVVNGIDVFDPKFNIVSPGADPRIYFSYSRTEERFSSLHPEIEELLFGREPGPDIRGVLEDRDKPIILSMARMDRIKNLSGLAEWYGRSSRLRELANLVIIGGHVDVQNSTDSEEREEIRRMHEIMDEYQLDGQMRWVGSQLDKTRVGELYRVVADGRGVFVQPALFEAFGLTVIEAMSSGLPVFATRHGGPLEIIEHGVSGFHIDPNDPEATAEKLADFLEAARERPKYWEEISDAALARVEERYTWERYAERLMTIARCFGFWRFVLSRESQVMRRYLQMFRHLQWRPLAHAVPME

SEQ ID NO: 97 - protein, 793 aa, synthetic construct
MIEELRQQLSDHPREWRAFLRHLVASQRPSWLHHDLQRACKDFREQPPEGYPEDIGWLADFVKHTQEAIFRDPWMVFAWRERPGVWYYVRIHVEQLAVEELSVSEYLQFKEELVGLSSEGEAVLEVDFEDFRPGSQRLKDESTIGNGLTHLNRHLAGRIWTDLGKGRSKILEFLSLHRLDGQQLMLSNRNTDFDSLRQTLQYLGTLPPETPWAEFREDMRRRGFEPGWGDTAGRVRETMRLLMDLLDSPSPAALEKFLARIPMISNVLIVSIHGWFAQDNVLGRPDTGGQVVYILDQARALEREMRERLRQQGVDVEPRILIATRLIPEADGTTCDQRLEPVHGTENVWILRVPFRYEDGRIHPHWISRFKVWPYLERYAEDLEREVLAELGGRPDLIIGNYSDGNLVATLLSEKLGVTQCNIAHALEKSKYLYSDLHWKDFEQQYHFACQFTADLIAMNAADIIITSTYQEIAGNDREVGQYESHQDFTLPGLYRVVNGIDVFDPKFNIVSPGADPRIYFSYSRTEERFSSLHPEIEELLFGREPGPDIRGVLEDRDKPIILSMARMDRIKNLTGLAEWYGRSSRLRELANLVIIGGHVDVQNSTDSEEREEIRRMHEIMDEYQLDGQMRWVGSQLDKTRVGELYRYVADGRGVFVQPALFEAFGLTVIEAMASGLPVFATRHGGPLEIIEHGVSGFHIDPNDPEATAEKLADFLEAARERPKYWEKISDAALQRVRERYTWERYAERLMTIARCFGFWRFVSSRERQVTRRYLQMFRHLQWRPLAHAVPME

SEQ ID NO: 98 - protein, 793 aa, synthetic construct
MIEELRQQLSDHPREWRAFLRHLVASQRPSWLHHDLQRACKDFREQPPEGYPEDIGALADFVKHTQEAIFRDPWMVFAWRERPGVWYYVRIHIEQLTVEELSVSEYLQFKEELVGLESEGEAVLEVDFEDFRRGSQRLKDESTIGNGLQHLNRHLAGRIWQDLGKGRSKILEFLSLHRLDGQQLMLSDRNQDFDSLRQALQYLGTLPPDTPWSEFREDMRRLGFEPGWGDTAERVRETMRLLMDLLDSPSPAALEKFLARIPMISNVLIVSIHGWFAQDNVLGRPDTGGQVVYILDQARALEREMRRRLREQGVDVEPRILIATRLIPEADGTTCDQRLEPVSGTENVWILRVPFRYEDGRIHPHWISRFKVWPYLERFAEDLEREVLAELGGRPDLIIGNYSDGNLVATLLSEKLGVTQCNIAHALEKSKYLYSDLYWRDFEQQYHFACQFTADLIAMNAADIIITSTYQEIAGNDREVGQYESHQDFTLPGLYRVVNGIDVFDPKFNIVSPGADPRIYFSYSRTEERFSSLHPEIEELLFGREPGPDIRGRLEDRDKPIILSMARMDRIKNLTGLAEWYGRSSRLRELANLVIIGGHVDVQNSTDSEEREEIRRMHEIMDEYNLDGQMRWVGSQLDKTRVGELYRYVADTRGVFVQPALFEAFGLTVIEAMASGLPVFATRHGGPLEIIEHGVSGFHIDPNDPEQTAELLADFLEAARERPKYWEKISQAALQRVRERYTWERYAERLMTIARCFGFWRFVSKRERQVTRRYLQMFRHLQWRPLAHAVPME

SEQ ID NO: 99 - protein, 793 aa, synthetic construct
MIEELRQQLLDHRNEWRAFLRHLVASGRDSWLHHDLQRACKDFREQPPEGYPEDIGWLADFVRHTQEAIFRDPWMYFAWRLRPGVWEYVRIHVEQLAVEELSVDEYLQFKEQLVGLGAEGEAVLTVDFEDFRPGFQRLKDESTIGNGLTHLNRHLAGRLWTDLGKGRSKILEFLGLHRLDGQQLMLSDRITDFDSLRQVLQYLGTLPPDTPWAEFREDMRRMGFEPGWGRTAERVRETMRLLMDLLDSPSPAALEKFLARIPMISNVLIVSIHGWFAQDNVLGRPDTGGQVVYILDQARALEREMRRRLRQQGVDVEPRILIATRLIPESDGTTCDQRLEPVHGTENVHILRVPFRYEDGRIHPHWISRFKVWPYLERFAEDLEREVLAELGGRPDLIIGNYSDGNLVATLLSEKLGVTQCNIAHALEKSKYLYSDLHWKDHEDQYHFACQFTADLIAMNAADIIVTSTYQEIAGNDREVGQYESHQDYTLPGLYRVVNGIDVFDPKFNIVSPGADPRIYFSYSRTEERFSSLHPEIEKLLFSREPGPDHRGVLEDRDKPIILSMARLDRIKNLTGLAEWYGRSSRLRELANLVIIGGHVDVDNSSDREEREEIERMHEIMDEYQLDGQMRWVGSQLDKTRVGELYRYVADTRGVFVQPALFEAFGLTVIEAMASGLPVFATRHGGPLEIIEDGVSGFHIDPNDPDATAEKLADFLEAARERPKYWEKISDAALQRVEERYTWERYAERLMTIARVFGFWRFVLKRERQVTERYLQMFRHLQWRPLAHAVPME

SEQ ID NO: 100 - protein, 793 aa, synthetic construct
MIEELRQQLLDHRNEWRAFLRHLVASGRDSWLHTDLQRACKTFREQPPEGYPEDIGWLADFVRHTQEAIFRDPWMYFAWRLRPGVWEYVRIHVEQLAVEELSTDEYLQFKEQLVGLGAEGEAVLTVDFEDFRPGFQRLKDESTIGDGLTHLNRHLAGRLWTDLGAGRSQILEFLGLHRLDGQQLMLSDRNTDFDSLRQVLQYLGTLPPDTPWAEFREDMRRMGFEPGWGDTAERVRETMRLLMDLLDSPSPAALESFLARIPMISNVLIVSIHGWFAQDNVLGRPDTGGQVVYILDQARALEREMRERLRQQGVDVEPRILIATRLIPESDGTTCDQRLEPVHGTENVHILRVPFRYEDGRIHPHWISRFKVWPYLERYAEDLEREVLAELGGRPDLIIGNYSDGNLVATLLSEKLGVTQCNIAHALEKSKYLYSDLHWKDHEQQYHFACQFTADLIAMNAADIIVTSTYQEIAGNDREVGQYESHQDYTLPGLYRVVNGIDVFDPKFNIVSPGADPRIYFSYSRTEERFSSLHPEIERLLFSREPGPDHRGVLEDRDKPIILSMARLDRIKNLTGLAEWYGRSSRLRELANLVIIGGHVDVQNSTDAEEREEIERMHEIMDEYQLDGQMRWVGSQLDKTVVGELYRYVADTRGVFVQPALFEAFGLTVIEAMSSGLPVFATRHGGPLEIIEDGVSGFHIDPNDPDATAEKLADFLEAARERPKYWEEISDAALARVEERYTWERYAERLMTIARVFGFWRFVLSRESQVMERYLQMFRHLQWRPLAHAVPME

SEQ ID NO: 101 - protein, 793 aa, synthetic construct
MIEELRQQLLDHPRSWRAFLRHLVASGRPLWLHHDLQRACKTFREQPPEGYPEDIGALADFVAHTQEAIFRDPWMVFAWRLRPGVWEYVRIHVEQLAVEELSTDEYLQFKEQLVGGGAEGEAVLTVDFEDFRPGFQRLKDESTIGNGLEHLNRHLAGRMWTDLGAGRSQILEFLGLHRLDGQQLMLSNRNTDFDSLRQAVQYLGTLPPETPWAEFREDMRRMGFEPGWGNTAGRVRETMRLLMDLLDSPSPAALESFLARIPMISNVLIVSIHGWFAQDNVLGRPDTGGQVVYILDQARALEREMRERLRQQGVDVEPRILIATRLIPESDGTTCDQRLEPVHGAENVQILRVPFRYEDGRIHPHWISRFKVWPYLERYAEDLEREVKAELGGRPDLIIGNYSDGNLVATLLSEKLGVTQCNIAHALEKSKYLYSDLYWKDHEQQYHFACQFTADLIAMNAADIIVTSTYQEIAGNDREVGQYESHQDYTLPGLYRVVNGIDVFDPKFNIVSPGADPRIYFSYSRTEERFSSLHPEIEELLFGREPGPPIRGVLEDRDKPIILSMARMDRIKNLTGLAEWYGRSPRLRELANLVIIGGHVDVQNSTDAEEREEIRRMHEIMDEYQLDGQMRWVGSQLDKTVVGELYRYVADTRGVFVQPALFEAFGLTVIEAMSSGLPVFATRHGGPLEIIEDGVSGFHIDPNDPEAVAEKLADFLEAARENPKYWEEISDAALARVSERYTWERYAERLMTIARVYGFWRFVLKRERQVTRRYLQMFRHLQWRPLAHAVPME

SEQ ID NO: 102 - protein, 793 aa, synthetic construct
MIEELRQQLQDHPNSWRAFLRHLVASGRGLWLHHDLQRACKTFREQPPEGYPEGISALADFVEHTQEAIFRDPWMVFALRLRPGVWEYVRIHVEQLAVEELSTDEYLQFKEQLVGGGSEGNAVLTVDFEDFRPGFQRLKDESTIGNGLQHLNRHLAGRMWTDLGKGRSQILEFLGLHRLDGQQLMLSDRITDFDSLRQAVQYLGTLPPETPWSEFEEDMRRMGFEPGWGRTAERVRETMRLLMDLLDSPSPAALEKFLARIPMISNVLIVSIHGWFAQDNVLGRPDTGGQVVYILDQARALEREMRERLRQQGVDVEPRILIATRLIPEADGTTCDQRLEPVSGAEHVHILRVPFRYEDGRIHPHWISRFKVWPYLERFAEDLEREVLAELGGRPDLIIGNYSDGNLVATLLSEKLGVTQCNIAHALEKSKYLYSDLYWKDFEDQYHFSCQFTADLIAMNAADIIITSTYQEIAGNDREVGQYESHQDYTLPGLYRVVNGIDVFDPKFNIVSPGADPRIYFSYSRTERRFSSLHPEIEELLFGREPGPPIRGVLEDRDKPIILSMARMDRIKNLTGLAEWYGRSPRLRELANLVIIGGHVDVQNSTDSEEREEIRRMHEIMDEYQLDGQMRWVGSQLDKTRVGELYRYVADRRGVFVQPALYEAFGLTVIEAMASGLPVFATRHGGPLEIIEDGVSGFHIDPNDPEAVAEKLADFLEAARNNPKYWEEISDAALQRVEERYTWERYAERLMTLARVYGFWRFVLKRERQVTRRYLQMFRHLQWRPLAHAVPME

SEQ ID NO: 103 - protein, 793 aa, synthetic construct
MIEELRQQLLDHPNTWRAFLRHLLASQRTIWLHHDLQRACKDFREQPPEGYPEDIGWLADFVEHTQEAIVRDPWVYFAWRERPGVWEYVRIHIEQLAVEELSVSEYLQFKEQLVDGGAEGEAVLTVDFEDFRPGFQRLKDESTIGDGLTHLNRHLAGRMWTDLGAGRSKILEFLGLHRLDGQQLMLSNRNTDFDSLRQTLQYLGTLPEETPWAEFREDMRRMGFEPGWGRTAGRVRETMRLLMDLLDSPSPAALETFLARIPMISNVLIVSIHGWFAQDNVLGRPDTGGQVVYILDQARALEREMRRRLRQQGVDVEPRILIATRLIPESDGTTCDQRLEPVHGTENVHILRVPFRYEDGRIHPHWISRFRVWPYLERYAEDLEREVLAELGGRPDLIIGNYSDGNLVATLLSEKLGVTQCNIAHALEKSKYLYSDLHWKDHEQQYHFACQFTADLIAMNAADIIITSTYQEIAGNDHEVGQYESHQSYTMPGLYRVVNGIDVFDPKFNIVSPGADPRIYFSYSRTEERFTSLWPEIEELLFGREPGPDHRGVLEDRDKPIILSMARMDRIKNLTGLAEWYGRSSRLRELANLVIIGGHVDVQNSSDAEEREEIRRMHEIMDEYQLDGQMRWVGSQLDKVRVGELYRYVADTRGVFVQPALFEAFGLTVIEAMSSGLPVFATRHGGPLEIIEDGVSGFHIDPNDPDAVAEKLADFLEAARERPKYWEEISDAALARVEERYTWERYAERLMTIARVFGFWKFVSSRERQVMERYLQMFRHLQWRPLAHAVPME

SEQ ID NO: 104 - protein, 793 aa, synthetic construct
MIEELRQQLLDHPNSWRAFLRHLVASGRDLWLHHDLQRACKTFREQPPEGYPEDIGWLADFVAHTQEAIFRDPWMVFAWRLRPGVWEYVRIHVEQLAVEELSTDEYLQAKEQLVGGGAEGEAVLTVDFEDFRPVSQRLKDESTIGDGLTHLNRHLAGRMWTDLGAGRSQILEFLSLHRLDGQQLMLSNGNTDFDSLRQTLQYLGTLPEETPWAEFREDMRRRGFEPGWGNTAGRVRETMRLLMDLLDSPSPAALESFLARIPMISNVLIVSIHGWFAQDNVLGYPDTGGQVVYILDQARALEREMRNRLRQQGVDVEPRILIATRLIPESDGTTCDQRLEPVHGTENVQILRVPFRYEDGRIHPHWISRFKVWPYLERYAEDLEREVLAELGSRPDLIIGNYSDGNLVATLLSEKLGVTQCNIAHALEKSKYLYSDLHWKDHEQDYHFACQFTADLIAMNAADIIVTSTYQEIAGNDREVGQYESHQDYTLPGLYRVVNGIDVFDPKFNIVSPGADPRIYFSYSRTEERFSSLWPEIESLLFGREPGPDIRGVLEDRQKPIILSMARMDRIKNLTGLAEWYGRSSRLRELANLVIIGGHVDVANSRDAEEREEIRRMHEIMDHYQLDGQMRWVGSQLDKTVVGELYRYVADGRGVFVQPALFEAFGLTVIEAMSSGLPVFATRHGGPLEIIEDGVSGFHIDPNDPEATAEKLADFLEAARERPKYWEEISDAALARVSERYTWERYAERLMTLARVYGFWRFVLSRERQVTERYLQMFRHLQWRPLAHAVPME

SEQ ID NO: 105 - protein, 793 aa, synthetic construct
MIEELRQQLLDHPDSWRAFLRHLVASGRDLWLHHDLQRACKTFREQPPEGYPEDIGWLADFVAHTQEAIFRDPWMVFAWRLRPGVWEYVRIHVEQLAVEELSTDEYLQAKEQLVGGGAEGEAVLTVDFEDFRPGFQRLKDESTIGNGLTHLNRHLAGRMWTDLGAGRSQILEFLSLHRLDGQQLMLSDGNTDFDSLRQTLQYLGTLPEETPWAEFREDMRRRGFEPGWGDTAGRVRETMRLLMDLLDSPSPAALESFLARIPMISNVLIVSIHGWFAQDNVLGYPDTGGQVVYILDQARALEREMRNRLRQQGVDVEPRILIATRLIPDSDGTTCDQRLEPVHGTENVQILRVPFRYEDGRIHPHWISRFKVWPYLERYAEDLEREVLAELGGRPDLIIGNYSDGNLVATLLSEKLGVTQCNIAHALEKSKYLYSDLHWKDHEQQYHFACQFTADLIAMNAADIIITSTYQEIAGNDREVGQYESHQDYTLPGLYRVVNGIDVFDPKFNIVSPGADPRIYFSYSRTEKRFSSLWPEIEELLFGREPGPDIRGVLEDRDKPIILSMARMDRIKNLTGLAEWYGRSSRLRELANLVIIGGHVDVANSRDAEEREEIRRMHEIMDEYQLDGQMRWVGSQLDKTRVGELYRYVADTRGVFVQPALFEAFGLTVIEAMSSGLPVFATRHGGPLEIIEDGVSGFHIDPNDPEATAEKLADFLEAARERPKYWEEISDAALARVEERYTWERYAERLMTLARVYGFWRFVSSRERQVTERYLQMFRHLQWRPLAHAVPME

SEQ ID NO: 106 - protein, 793 aa, synthetic construct
MIEELRQQLLDHPDSWRAFLRHLVASGRDLWLHHDLQRACKTFREQPPEGYPEDIGALADFVKHTQEAIFRDPWMVFAWRLRPGVWEYVRIHVEQLAVEELSTDEYLQFKEQLVGGGAEGEAVLTVDFEDFRRGFQRLKDESTIGNGLEHLNRHLAGRMWTDLGRGRSQILEFLSLHRLDGQQLMLSDGNTDFDSLRQALQYLGTLPPETPWAEFREDMRRRGFEPGWGDTAGRVRETMRLLMDLLDSPSPAALEKFLARIPMISNVLIVSIHGWFAQDNVLGYPDTGGQVVYILDQARALEREMRRRLRQQGVDVEPRILIATRLIPDSDGTTCDQRLEPVHGTENVWILRVPFRYEDGRIHPHWISRFKVWPYLERFAEDLEREVLAELGGRPDLIIGNYSDGNLVATLLSEKLGVTQCNIAHALEKSKYLYSDLYWKDHEDQYHFACQFTADLIAMNAADIIITSTYQEIAGNDREVGQYESHQDYTLPGLYRVVNGIDVFDPKFNIVSPGADPRIYFSYSRTERRFSSLHPEIEELLFGREPGPDIRGVLEDRDKPIILSMARMDRIKNLTGLAEWYGRSPRLRELANLVIIGGHVDVANSTDSEEREEIRRMHEIMDEYQLDGQMRWVGSQLDKTRVGELYRYVADRRGVFVQPALFEAFGLTVIEAMASGLPVFATRHGGPLEIIEDGVSGFHIDPNDPEATAEKLADFLERARERPKYWEEISDAALQRVRERYTWERYAERLMTLARVYGFWRFVSSRERQVTERYLQMFRHLQWRPLAHAVPME

SEQ ID NO: 107 - protein, 793 aa, synthetic construct
MIEVLRQQLLDSPRSWRAFLRHLVASQRDSWLHTDLQHACKTFREQPPEGYPEDIGWLADFIAHCQEAIFRDPWMVFAWRLRPGVWEYVRIHVEQLAVEELSTDEYLQAKEQLVGLGAEGEAVLTVDFEDFRPVSQRLKDESTIGDGLTHLNRHLAGRIWTDLAAGRSAILEFLGLHRLDNQNLMLSNGNTDFDSLRQTVQYLGTLPRETPWAEFREDMRRRGFEPGWGNTAGRVRETMRLLMDLLDSPSPAALESFLDRIPMISNVLIVSIHGWFAQDKVLGRPDTGGQVVYILDQARALEREMRNRLRQQGVDVEPRILIATRLIPESDGTTCDQRLEPVHGAENVQILRVPFRYEDGRIHPHWISRFKVWPYLERYARDLEREVKAELGSRPDLIIGNYSDGGLVATILSEKLGVTQCNIAHALEKSKYPGSDLHWPLYEQDHHFACQFTADLIAMNAADIIVTSTYQEIAGNDREVGQYESHQDYTLPGLYRVENGIDVFDSKFNIVSPGADPSTYFSYARHEERFSSLWPEIESLLFGREPGPDIRGVLEDPQKPIIFSVARMDRIKNLSGLAELYGRSARLRSLANLVIIGGHVDVQASMDAEEREEIRRMHEIMDRYQLDGQMRWVGSHLDKRVVGELYRVVADGRGVFVQPALFEAFGLTVIEAMSSGLPVFATRHGGPLEIIEDGVSGFHIDPNDPEAVAEKLADFLEAARERPKYWEEISQAALARVSERYTWERYAERLMTLARIYGFWRFVLSRESQVMERYLQMFRHLQWRPLAHAVPME

SEQ ID NO: 108 - protein, 793 aa, synthetic construct
MIEVLRQQLLDSPRSWRAFLRHLVASQRDSWLHTDLQHACKTFREQPPEGYPEDIGWLADFIAHCQEAIFRDPWMVFAWRLRPGVWEYVRIHVEQLAVEELSTDEYLQAKEQLVGLGAEGEAVLTVDFEDFRPVSQRLKDESTIGDGLTHLNRHLAGRIWTDLAAGRSAILEFLGLHRLDNQNLMLSNGNTDFDSLRQTVQYLGTLPRETPWAEFREDLRRRGFEPGWGNTAGRVRETMRLLMDLLDSPSPAALESFLDRIPMISNILIVSIHGWFAQDKVLGRPDTGGQVVYILDQARALEREMRNRLRQQGVDVEPRILIATRLIPESDGTTCDQRLEPVHGAENVQILRVPFRYEDGRIHPHWISRFKIWPYLERYARDLEREVKAELGSRPDLIIGNYSDGGLVATILSEKLGVTQCNIAHALEKSKYPGSDLHWPLYEQDHHFACQFTADLIAMNAADIIVTSTYQEIAGNDREVGQYESYQDYTLPGLYRVENGIDVFDSKFNIVSPGADPSTYFSYARHEERFSSLWPEIESLLFGREPGPDIRGVLEDPQKPIIFSVARMDRIKNLSGLAELYGRSARLRSLANLVIIGGHVDVQASMDAEEREEIRRMHEIMDRYQLDGQMRWVGSHLDKRVVGELYRVVADGRGVFVQPALFEAFGLTVIEAMSSGLPVFATRHGGPLEIIEDGVSGFHIDPNDPEAVAEKLADFLEAARERPKYWEEISQAALARVSERYTWERYAERLMTLARIFGFWRFVLSRESQVMERYLQMFRHLQWRPLAHAVPME

SEQ ID NO: 109 - protein, 793 aa, synthetic construct
MIEVLRQQLLDSPRSWRAFLRHLVASQRDSWLHTDLQHACKTFREQPPEGYPEDIGWLADFIAHCQEAIFRDPWIVFAWRLRPGVWEYVRIHVEQLAVEELSTDEYLQAKEQLVGLGAEGEAVLTVDFEDFRPVSQRLKDESTIGDGLTHLNRHLAGRIWTDLAAGRSAILEFLGLHRLDNQNLMLSNGNTDFDSLRQTVQYLGTLPRETPWAEFREDLRRRGFEPGWGNTAGRVRETMRLLMDLLDSPSPAALESFLDRIPMISNILIVSIHGWFAQDKVLGRPDTGGQVVYILDQVRALEREMRNRLRQQGVDVEPRILIATRLIPESDGTTCDQRLEPVHGAENVQILRVPFRYEDGRIHPHWISRFKVWPYLERYARDAEREVKAELGSRPDLIIGNYSDGGLVATILSEKLGVTQCNIAHALEKSKYPGSDLHWPLYEQDHHFACQFTADLIAMNAADIIVTSTYQEIAGNDREVGQYESYQDFTLPGLYRVENGIDVFDSKFNIVSPGADPSTYFSYARHEERFSSLWPEIESLLFGREPGPDIRGVLEDPQKPIIFSVARMDRIKNLSGLAELFGRSARLRSLANLVIIGGHVDVQASMDAEEREEIRRMHEIMDRYQLDGQMRWIGSHLDKRVVGELYRVVADGRGVFVQPALFEAFGLTVIEAMSSGLPVFATRHGGPLEIIEDGVSGFHIDPNDPEAVAEKLADFLEAARERPKYWEEISQAALARVSERYTWERYAERLMTLARIYGFWRFVLSRESQVMERYLQMFRHLQWRPLAHAVPME

SEQ ID NO: 110 - protein, 793 aa, synthetic construct
MIEVLRQQLLDSPRSWRAFLRHLVASQRDSWLHTDLQHACKTFREQPPEGYPEDIGWLADFIAHCQEAIFRDPWAYFAWRLRPGVWEYVRIHVEQLAVEELSTDEFLQAKEQLVGLGAEGEAVLTVDFEDFRPVSQRLKDESTIGDGLTHLNRHLAGRIWTDLAAGRSAILEFLGLHRLDNQNLMLSNGNTDFDSLRQTVQYLGTLPRETPWAEFREDMRRRGFEPGWGNTAGRVRETMRLLMDLLDSPSPAALESFLDRIPMISNVLIVSPHGWFAQDKVLGRPDTGGQVVYILDQVRALEREMRNRLRQQGVDVEPRILILTRLIPESDGTTCDQRLEPVHGAENVQILRVPFRYEDGRIHPHWISRFKIWPYLERYARDLEREVKAELGSRPDLIIGNYSDGNLVATILSEKLGVTQCNIAHALEKSKYPGSDLHWPLYEQDHHFACQFTADLIAMNAADIIVTSTYQEIAGNDREVGQYESYQDYTLPGLYRVENGIDVFDSKFNIVSPGADPSTYFSYARHEERFSSLWPEIESLLFGREPGPDIRGVLEDPQKPIIFSVARMDRIKNLSGLAELYGRSARLRSLANLVIIGGHVDVQASMDAEEREEIRRMHEIMDRYQLDGQMRWVGSHLDKRVVGELYRVVADGRGVFVQPALFEAFGLTVIEAMSSGLPVFATRHGGPLEIIEDGVSGFHIDPNDPEAVAEKLADFLEAARERPKYWEEISQAALARVSERYTWERYAERLMTLARIYGFWRFVLSRESQVMERYLQMFRHLQWRPLAHAVPME

SEQ ID NO: 111 - protein, 793 aa, synthetic construct
MIEVLRQQLLDSPRSWRAFLRHLVASQRDSWLHTDLQHACKTFREQPPEGYPEDIGWLADFIAHCQEAIFRDPWICFAWRLRPGVWEYLRIHVEQLAVEELSTDEYLQAKEQLVGLGAEGEAVLTVDFEDFRPVSQRLKDESTIGDGLTHLNRHLAGRIWTDLAAGRSAILEFLGLHRLDNQNLMLSNGNTDFDSLRQTVQYLGTLPRETPWAEFREDMRRRGFEPGWGNTAGRVRETMRLLMDLLDSPSPAALESFLDRIPMISNILILSPHGWFGQDKVLGRPDTGGQVVYILDQARALEREMRNRLRQQGVDVEPRILIATRLIPESDGTTCDQRLEPVHGAENVQILRVPFRYEDGRIHPHWISRFKVWPYLERYARDLEREVKAELGSRPDLIIGNYSDGNLVATILSEKLGVTQCNIAHALEKSKYPGSDLHWPLYEQDHHFACQFTADLIAMNAADFIITSTYQEIAGNDREVGQYESHQDYTLPGLYRVENGIDVFDSKFNIVSPGADPSTYFSYARHEERFSSLWPEIESLLFGREPGPDIRGVLEDPQKPILFSVARLDRIKNLSGLAELYGRSARLRSLANLVIIGGHVDVQASMDAEEREEIRRMHEIMDRYQLDGQMRWVGSHLDKRVVGELYRVVADGRGVFVQPALFEAFGLTVIEAMSSGLPVFATRHGGPLEIIEDGVSGFHIDPNDPEAVAEKLADFLEAARERPKYWEEISQAALARVSERYTWERYAERLMTLARIYGFWRFVLSRESQVMERYLQMFRHLQWRPLAHAVPME

SEQ ID NO: 112 - protein, 793 aa, synthetic construct
MIEVLRQQLLDSPRSWRAFLRHLVASQRDSWLHTDLQHACKTFREQPPEGYPEDIGWLADFIAHCQEAVFRDPWIVFAWRLRPGVWEYVRIHVEQLAVEELSTDEYLQAKEQLVGLGAEGEAVLTVDFEDFRPVSQRLKDESTIGDGLTHLNRHLAGRIWTDLAAGRSAILEFLGLHRLDNQNLMLSNGNTDFDSLRQTVQYLGTLPRETPWAEFREDMRRRGFEPGWGNTAGRVRETMRLLMDLLDSPSPAALESFLDRIPMISNVLILSPHGWFAQDKVLGRPDTGGQVVYILDQVRALEREMRNRLRQQGVDVEPRILVVTRLIPESDGTTCDQRLEPVHGAENVQILRVPFRYEDGRIHPHWISRFKIWPYLERYARDAEREVKAELGSRPDLIIGNYSDGNLVATILSEKLGVTQCNIAHALEKSKYPGSDLHWPLYEQDHHFACQFTADLIAMNAADFIVTSTYQEIAGNDREVGQYESHQDYTLPGLYRVENGIDVFDSKFNIVSPGADPSTYFSYARHEERFSSLWPEIESLLFGREPGPDIRGVLEDPQKPILFSVARLDRIKNLSGLAELFGRSARLRSLANLVIIGGHVDVQASMDAEEREEIRRMHEIMDRYQLDGQMRWLGSHLDKRVVGELYRVVADGRGVFVQPALFEAFGLTVIEAMSSGLPVFATRHGGPLEIIEDGVSGFHIDPNDPEAVAEKLADFLEAARERPKYWEEISQAALARVSERYTWERYAERLMTLARIYGFWRFVLSRESQVMERYLQMFRHLQWRPLAHAVPME

SEQ ID NO: 113 - protein, 793 aa, synthetic construct
MIEVLRQQLLDSPRSWRAFLRHLVASQRDSWLHTDLQHACKTFREQPPEGYPEDIGWLADFIAHCQEAIFRDPWMVFAWRLRPGVWEYVRIHVEQLAVEELSTDEYLQAKEQLVGLGAEGEAVLTVDFEDFRPVSQRLKDESTIGDGLTHLNRHLAGRIWTDLAAGRSAILEFLGLHRLDNQNLMLSNGNTDFDSLRQTVQYLGTLPRETPWAEFREDLRRRGFEPGWGNTAGRVRETMRLLMDLLDSPSPAALESFLDRIPMISNVLIVSPHGWFAQDKVLGRPDTGGQVVYILDQVRALEREMRNRLRQQGVDVEPRILIVTRLIPESDGTTCDQRLEPVHGAENVQILRVPFRYEDGRIHPHWISRFKVWPYLERYARDAERELKAELGSRPDLIIGNYSDGNLVATILSEKLGVTQCNIAHALEKSKYPGSDLHWPLYEQDHHFACQFTADLIAMNAADFIITSTYQEIAGNDREVGQYESHQDYTLPGLYRVENGIDVFDSKFNIVSPGADPSTYFSYARHEERFSSLWPEIESLLFGREPGPDIRGVLEDPQKPIIFSVARMDRIKNLSGLAELYGRSARLRSLANLVIIGGHVDVQASMDAEEREEIRRMHEIMDRYQLDGQMRWVGSHLDKRVVGELYRVVADGRGVFVQPALFEAFGLTVIEAMSSGLPVFATRHGGPLEIIEDGVSGFHIDPNDPEAVAEKLADFLEAARERPKYWEEISQAALARVSERYTWERYAERLMTLARIFGFWRFVLSRESQVMERYLQMFRHLQWRPLAHAVPME

SEQ ID NO: 114 - protein, 793 aa, synthetic construct
MRERVEDTLSAHRNELVSLLSRYVAQGKGILQPHQLLDELEAVIEEDEEKEKLKDGPFGEVLRSTQEAIVLPPWVALAVRPRPGVWEYVRVNVDELSVEQLTVSEYLRFKEELVDGSSEGNAVLEVDFEDFNASFQRPKDESTIGNGVQHLNRHLSGRMWRDLESGMEPLLDFLRAHKYKGHTMMLNDRIQSFDRLRKAEQYLGKLPPDTPYSEFEHKLQELGLERGWGDTAERVLEMIRLLMDILDSPSPSTLEKFLGRIPMVFNVVILSPHGYFGQANVLGLPDTGGQVVYILDQVRALENEMLLRIKQQGLDITPRILIVTRLIPDAKGTTCNQRLEKVSGTEHSHILRVPFRTEKGILRPKWISRFDVWPYLERFAEDVANEIAAELQGKPDLIIGNYSDGNLVASLLAHKLGVTQCTIAHALEKTKYPDSDIYWKKFEEKYHFSCQFTADLIAMNHADFIITSTYQEIAGSDDTVGQYESHTAFTLPGLYRVVHGIDVFDPKFNIVSPGADMSIYFPYTEKEKRLTSLHPEIEELLYSPEQNDEHIGVLKDRSKPIIFSVARLDRVKNITGLVEWYGKNARLRELVNLVVVAGYIDVKKSKDREEIAEIEKMHELIKKYNLNGQFRWISAHMNKVRVGELYRYIADTKGAFVQPAFYEAFGLTVVEAMTCGLPTFATCHGGPAEIIEHGVSGFHIDPYHGDQAAELLADFFEKCKEDPSHWDKISEGGLQRIYEKYTWKIYSERLMTLAGVYGFWKYVSKRERQVTRRYLQMFRHLQFRPLAHSVPLE

SEQ ID NO: 115 - protein, 793 aa, synthetic construct
MRERVEDTLSAHRNELVSLLSRYVAQGKGILQPHQLLDELEAIIEEDREKEKLKDGPFGEVLRSTQEAIVLPPWVALAVRPRPGVWEYVRVNVHELSVEQLTVSEYLQFKEELVDGSAEGNAVLEVDFEDFNASFQRPKDESTIGNGVQHLNRHLSGRLWRDLESGLQPLLDFLRAHKYKGHTMMLNDRIQSFDRLRKAEQYLGTLPPDTPYSEFEHKLQELGLEKGWGDTAERVLEMIRLLMDLLDSPSPSTLEKFLGRIPMVFNVVILSPHGYFAQANVLGLPDTGGQVVYILDQVRALENEMLLRIKQQGLDITPRILIVTRLLPDAKGTTCNQRLEKVSGTEHSYILRVPFRTEKGIVRPKWISRFDVWPYLERFAEDVANEIAAELQGKPDLIIGNYSDGNLVASLLAHKLGVTQCTIAHALEKTKYPDSDIYWKKFDEKYHFSCQFTADLIAMNHADFIITSTYQEIAGSDDTVGQYESHTAFTLPGLYRVVHGIDVFDPKFNIVSPGADMSIYFPYTEKERRLTSLHPEIEELLYSPEQNDEHIGVLKDRSKPIIFSVARLDRVKNITGLVEWYGKNAKLRELVNLVVVAGDRDVKKSKDREEIAEIEKMHELIEKYNLNGQFRWISAHMNKVRVGELYRYIADTRGAFVQPALYEAFGLTVVEAMTCGLPTFATCHGGPAEIIVHGVSGFHIDPYHPDQAAELLVDFFEKCKEDPSHWDKISEGGLQRIYEKYTWKIYSERLMTLAGVYGFWKYVSKRERQVTRRYLQMFRHLQYRPLAHSVPLE

SEQ ID NO: 116 - protein, 793 aa, synthetic construct
MIEALREFLSEHRDAVYLLLRRYLGLGRPFLLRSDLWDEFERFCEEQGEEEELLDSPLARAIRRAQEAALDAPWVYLAVRPRVARWRYLRIHLETLDVEEISVSEFLAFKERLVNGDAEGEAVLEVDFGDFNREFQKLKDESTIGRGVEHLNRHLSGRLWQDLGKGDQRLLEFLRVHQYRGQQLMLNGRIRDFDGLRRALQYLGGQPDEAPWEEVGHALQELGFEPGWGRTVARIRDTMRLLMDILDSPSPGNLERFLGRIPMIFSLAILSPHGYFGQANVLGRPDTGGQVVYILDQVRALEREMRQRLYEQGLDIEPQILVVTRLIPEAGGTTCDQRLEPIVGTRNARILRVPFRNEDGEVIPHWISRFEVWPYLERFALDVERELLAELGGRPDLIIGNYSDGNLVATLLSQKLGVTQCNIAHALEKTKYLYSDLYWRDNEAQYHFSCQFTADLIAMNAADFIITSTYQEIAGTDDSVGQYESYAAFTMPGLYRVVNGIDVFDPKFNIVSPGADADVYFPYTEQERRLTGLHPEIEELIYGGPPRPDARGVLADPDKPLLFTVARLDRIKNITGLVEWYGASERLRELANLVVIAGHVDPARSGDREERAQIERMHELMDRYGLDGQVRWLGLHLDKNLVGELYRYVADRRGAFVQPALFEAFGLTVIEAMSSGLPTFATRYGGPLEIIEDGVSGFHIDPNHGEAAAELMADFFERCAADPGYWERISQGALERVRARYTWELYAERMMTLSRIYGFWKYVTNRERQVTRRYLQMFRHLQFRPLAHAVPLE

SEQ ID NO: 117 - protein, 793 aa, synthetic construct
MIETLEQFLSEHRDAVYLLLRRYLALGRPFLLRSDLWDEFAAFCEEEGEGAELRDSPLARLISRTQEAAVDAPWIYLAVRPRVARWEYLRIHVETLEVEELSVSEFLAFKERLVGGDAEGDAVLEVDLGDFNREFQKLKDESTIGRGVEHLNRHLSGRLWQDLGGGDQRLLDFLRVHQYRGQQLMLNDRIRDFDELRRALQYLGGQPPEAPWEEVAHELQRLGFEPGWGRTVARMRDTLRLLMDILDSPSPANLERFLGRIPMIFSIAILSPHGYFGQSNVLGLPDTGGQVVYILDQVRALEREMRRRLAEQGLDIEPQILVVTRLIPEAGGTTCDQRLEPIVGTRNARILRVPFRNEDGEVLPHWISRFEVWPYLERFALDVERELLAELGGRPDLIIGNYSDGNLVATLLAQKLGVTQCNIAHALEKTKYLYSDLYWRDNEEQYHFSCQFTADLIAMNAADFIITSTYQEIAGRDDSVGQYESYSAFTMPGLYRVVNGIDVFDPKFNIVSPGADAEVYFPYTETERRLTGLHPEIEELIFGGPPRPDARGVLADPDKPLLFTVARLDRIKNITGLVEWYGRSPRLRELANLLVVAGHVDPAQSDDREEREQIERMHELMDEYGLDGQVRWLGLHLDKNLVGELYRYVADRRGAFVQPALFEAFGLTVIEAMASGLPTFATCYGGPLEIIEDGVSGFHIDPNHGEEAAERIADFFERCAADPGYWERLSQGALARVRSRYTWELYAERMMTLSRIYGFWKYVTNRERQVTRRYLQMFRHLQFRPLAHAVPLE

SEQ ID NO: 118 - protein, 793 aa, synthetic construct
MIEELEEFLSEHRDSVYLLLRHYLGLGRPFLLRSDLWDEFERFCEEHGEGQGLLDSPLARAIASAQEAAVDAPWIYLAVRPRVARWEYLRIHVETLEVEEISVSEFLAFKERLVGGDPEGEAVLEVDLGDFNREFQKLKDESTIGRGVEHLNRHLSGRLWQDLGKGDQRLLDFLRVHQYRGQQLMLNDRIRDFDALRRALQYLGGQPPEATWEEVGHRLQELGFEPGWGRTVARMRDTLRLLMDILDSPSPETLERFLGRIPMIFSIAILSPHGYFGQANVLGLPDTGGQVVYILDQVRALEKEMRRRLHEQGLDIEPQILVVTRLIPEAGGTTCDQRLEPIVGTRNARILRVPFRNEDGEVIPHWISRFEVWPYLERFALDVERELLAELGGRPDLIIGNYSDGNLVATLLAQKLGVTQCNIAHALEKTKYLYSDLYWKENEEQYHFSCQFTADLIAMNAADFIITSTYQEIAGTDDSVGQYESYSAFTMPGLYRVVNGIDVFDPKFNIVSPGADAEVYFPYTETERRLTGLHPEIEELVFGGEDRPDARGVLADPDKPLLFTVARLDRIKNITGLVEWYGRSERLREQANLLVVAGHVDAALSDDREEREQIARMHELMDEYGLDGQVRWLGVHLDKNLVGELYRYVADRRGAFVQPALFEAFGLTVIEAMSSGLPTFATCYGGPLEIIEDGVSGFHIDPNHGEEAAEIIADFFERCAKEPGYWERISQGALERVRSRYTWELYAERMMTLSRIYGFWKYVTNRERQVTRRYLQMFRHLQFRPLAHAVPLE

SEQ ID NO: 119 - protein, 793 aa, synthetic construct
MIESLREFLAEHRDAVYLLLRRYLALGRPFLLRSDLWDEFEAFCEEDGEESALKDSPLARLIAATQEAALDAPWIYLAVRPRVARWEYLRIHLEDLEVEEITVSEYLAFKERLVNGDPEGEAVLEVDLGDFNREFQKLKDESTIGRGVEHLNRHLSGRLWQDLGKGDQRLLEFLRVHQYRGQQLMLNDRIKDFDGLRRAEQYLGTQPPDAPWEEVAHALQELGFEPGWGRTAERMRDTLRLLMDILDSPSPETLERFLGRIPMIFNIAILSPHGYFGQANVLGLPDTGGQVVYILDQVRALEREMRRRLAEQGLDIEPQILVVTRLIPEAGGTTCDQRLEPIVGTRNARILRVPFRNEDGEVVPQWISRFEVWPYLERFALDVERELLAELGGRPDLIIGNYSDGNLVATLLAQKLGVTQCNIAHALEKTKYLYSDLYWRDNEEQYHFSCQFTADLIAMNAADFIITSTYQEIAGTDDSVGQYESYSAFTMPGLYRVVNGIDVFDPKFNIVSPGADAEVYFPYTETERRLTGLHPEIEELLFGGEQRPDARGVLEDRDKPLLFTVARLDRIKNITGLVEWYGRSPRLRELANLLVVAGHVDPEKSDDREERAQIERMHELMDEYGLDGQVRWLGVHLDKNLVGELYRYVADRRGAFVQPALFEAFGLTVIEAMSSGLPTFATCYGGPLEIIEDGVSGFHIDPNHGEEAAERIADFFERCAADPGYWERISQGALERVRSRYTWKLYAERLMTLSRIYGFWKYVTNRERQVTRRYLQMFRHLQYRPLAHAVPLE

SEQ ID NO: 120 - protein, 793 aa, synthetic construct
MIESLEQFLSEHRDAVYLLLRRYLGLGRPFLLRSDLWDEFDRFCEEREEEEGLADSPLARLIAAAQEAAIDAPWIYLAVRPRVARWEYLRIHLETLSVEEVSVSEFLAFKERLVNGDPEGPAVLEVDLGDFNREFQKLKDESTIGRGVEHLNRHLSGRLWQDLGKGDQRLLEFLRVHQYRGQQLMLNDRIRDFDGLRRALQYLGTQPPEAPWEEVGHELQELGFEPGWGRTVARIRDTLRLLMDILDSPSPATLERFLGRIPMIFSIAILSPHGYFGQSNVLGLPDTGGQVVYILDQVRALEREMRRRLAEQGLDIEPQILVVTRLIPEAGGTTCDQRLEPIVGTENARILRVPFRNEDGEVVPQWISRFEIWPYLERFALDAERELLAELGGRPDLIIGNYSDGNLVATLLSQKLGVTQCNIAHALEKTKYLYSDLYWRDNEAQYHFSCQFTADLIAMNAADFIITSTYQEIAGNDDSVGQYESYSAFTMPGLYRVVNGIDVFDPKFNIVSPGADAEIYFPYTETERRLTGLHPEIEELIFGGEDRPDARGVLADPDKPLLFTVARLDRIKNITGLVEWYGRSERLRELANLLVIAGHVDPAQSDDDEEREQIARMHELMDEYGLDGQVRWLGVHLDKNLVGELYRYVADRRGAFVQPALFEAFGLTVIEAMSSGLPTFATRYGGPLEIIEDGVSGFHIDPNHGEEAAELMADFFERCAADPGYWERISQGGLERVRSRYTWELYAERMMTLSRIYGFWKYVTNRERQVTRRYLQMFRHLQFRPLAHAVPLE

SEQ ID NO: 121 - protein, 793 aa, synthetic construct
MIEELRQFLQEHRDALYLLLRRYLALGRPFLLRSDLWDEFAAFCEEDGEEEGLADSPLARAIAKAQEAALDAPWIYLAVRPRVARWEYLRIHLETLDVEEVSVSEFLAFKERLVGGDAEGEAVLEVDLGDFNREFQKLKDESTIGRGVEHLNRHLSGRLWQDLGKGDQRLLDFLRVHQYRGQQLMLNDRIRDFDALRRALQYLGRQPPEAPWEEVAHRLQRLGFEPGWGRTAARIRDTMRLLMDILDSPSPAALERFLGRIPMIFSIAILSPHGYFGQANVLGRPDTGGQVVYILDQVRALEREMRRRLAEQGLDIEPQILVVTRLIPEAGGTTCDQRLEPIVGTENARILRVPFRNESGEVVPHWISRFEVWPYLERFALDVEKELLAELGGRPDLIIGNYSDGNLVATLLAQKLGVTQCNIAHALEKTKYLYSDLYWRDNEEQYHFSCQFTADLIAMNAADFIITSTYQEIAGTDDSVGQYESYSAFTMPGLYRVVNGIDVFDPKFNIVSPGADAEVYFPYTDTERRLTGLHPEIEELVYGGEPRGDARGVLADRDKPLLFTVARLDRIKNITGLVEWYGRSPRLRELANLLVIAGHVDPARSADREEREQIQRMHELMDRHGLDGQVRWLGVHLDKNLVGELYRYVADRRGAFVQPALFEAFGLTVIEAMASGLPTFATRYGGPLEIIEDGVSGFHIDPNHGEAAAERMADFFERCAADPGYWERISQAALERVEARYTWKLYAERMMTLSRIYGFWKYVTNRERQVTRRYLQMFRHLQFRPLAHAVPLE

SEQ ID NO: 122 - protein, 793 aa, synthetic construct
MIEELREFLSDHRDAVYLLLRRYLALGRPFLLRSDLWDEFEAFCEEQGEEEGLCDSPLARLIRRAQEAVVEAPWLYLAVRPRVARWRYLRFHVETLEVEEISVSEFLAFKERLVNGDAEGPAVLEVDLGDFNREFQKLKDESTIGRGVEHLNRHLSGRLWQDLGKGDQRLLEFLRVHQYRGQQLMLNDRIRDFDALRRALQYLGKQPPDAPWEEVAHELQELGFEPGWGRTAARMRETLRLLMDILDSPSPGTLERFLGRIPMIFSIAILSPHGYFGQDNVLGRPDTGGQVVYILDQVRALEREMRRRLAEQGLDIEPQILVVTRLIPEAGGTTCDQRLEPIVGTRNARILRVPFRNEDGEVVPHWISRFEVWPYLERFALDVERELLAELGGRPDLIIGNYSDGNLVATLLAQKLGVTQCNIAHALEKTKYLYSDLYWRDNEEQYHFSCQFTADLIAMNAADFIITSTYQEIAGTDDSVGQYESYQAFTLPGLYRVVNGIDVFDPKFNIVSPGADPEVYFPYTETERRLTGLHPEIEELVFGGEPRPDARGVLADPDKPLLFTVARLDRIKNITGLVEWYGRSERLRELANLLVIAGHVDPAQSDDAEEREQIARMHELMDRHGLDGQVRWLGVHLDKNLVGELYRYVADRRGAFVQPALFEAFGLTVIEAMSSGLPTFATCYGGPLEIIEDGVSGFHIDPNHGEQAAELIADFFERCAAEPGYWERISQGALERVEARYTWELYAERMMTLSRIYGFWKYVTNRERQVTRRYLQMFRHLQFRPLAHAVPLE

SEQ ID NO: 123 - protein, 793 aa, synthetic construct
MIEELREFLAEHRDALYLLLRRYVGLGRPFLLRSDLWDEFERFCEEDGEEAGLADSPLARAISATQEAAVDAPWIYLAVRPRVARWEYLRIHLETLEVEEISVSEFLAFKERLVNGDAEGDAVLEVDLGDFNREFQKLKDESTIGRGVEHLNRHLSGRLWQDLGKGDQRLLDFLRVHQYRGQQLMLNDRIRDFDALRRALQYLGRQPDEAPWEDVAHRLQRLGFEPGWGRTAARVRDTLRLLMDILDSPSPRTLERFLGRIPMIFSIAILSPHGYFGQANVLGLPDTGGQVVYILDQVRALEREMRQRLAEQGLDIEPQILVVTRLIPEAGGTTCDQRLEPISGTENARILRVPFRNEDGEVVPHWISRFEIWPYLERFALEVERELLAELGGRPDLIIGNYSDGNLVATLLSQKLGVTQCNIAHALEKTKYLYSDLYWKDNEEQYHFSCQFTADLIAMNAADFIITSTYQEIAGTDDSVGQYESYSAFTMPGLYRVVNGIDVFDPKFNIVSPGADADVYFPYTETERRLTGLHPEIEELIFGGPERPDARGVLADRDKPLLFTVARLDRIKNITGLVEWYGRSPRLRELANLLVIAGHVDPEQSGDDEEREQIERMHELMDRYGLDGQVRWLGLHLDKNLVGELYRYVADRRGAFVQPALFEAFGLTVIEAMASGLPTFATCYGGPLEIIEDGVSGFHIDPNHGDEAAERIADFFERCAAEPGYWERISQGALERVRSRYTWELYAERMMTLSRIYGFWKYVTNRERQVTRRYLQMFRHLQFRPLAHAVPLE

SEQ ID NO: 124 - protein, 793 aa, synthetic construct
MIESLRDFLAEHRDAVYLLLRRYLGLGRPFLLRSDLWDEFLAFCEEQGEEEGLADSPLARLISAAQEAVLDAPWIYFAVRPRVARWRYLRFHVETMDVEEISVSEFLAFKERLVGGDAEGDAVLEVDLGDFNREFQKLKDESTIGRGVEHLNRHLSGRLWQDLGKGDQRLLEFLRVHQYRGRQLMLNDRITDFDELRRALQYLGRQPPEATWAEVGHRLQELGFEPGWGRTVARMRDTLRLLMDILDSPSPETLERFLGRIPMIFSIAILSPHGYFGQANVLGLPDTGGQVVYILDQVRALEREMRRRLAEQGLDIEPQILVVTRLIPEAGGTTCDQRLEPIVGTENARILRVPFRNEDGEVVPHWISRFEIWPYLERFALDVERELLAELGGRPDLIIGNYSDGNLVATLLSQKLGVTQCNIAHALEKTKYLYSDLYWRDNEEQYHFSCQFTADLIAMNAADFIITSTYQEIAGTDDSVGQYESYSAFTMPGLYRVVNGIDVFDPKFNIVSPGADAEVYFPYTETERRLTGLHPEIEELVFGGEPRPDARGVLADPDKPLLFTVARLDRIKNITGLVEWYGRNERLRELANLLVIAGHVDPARSGDREEREQIRRMHELMDEHGLDGQVRWLGVHLDKNLVGELYRFVADRRGAFVQPALFEAFGLTVIEAMSSGLPTFATCYGGPLEIIEHGVSGFHIDPNHGEEAAERIADFFERCAAEPGYWERISEGALERVRARYTWELYAERMMTLSRIYGFWKYVTNRERQVTRRYLQMFRHLQFRPLAHAVPLE

SEQ ID NO: 125 - protein, 793 aa, synthetic construct
MIEELEEFLSEHRDSVYLLLRHYLGLGRPFLLRSDLWDEFERFCEEHGEGQGLLDSPLARAIASAQEAAVDAPWIYLAVRPRVARWEYLRIHVETLEVEEISVSEFLAFKERLVGGDPEGEAVLEVDLGDFNREFQKLKDESTIGRGVEHLNRHLSGRLWQDLGKGDQRLLDFLRVHQYRGQQLMLNDRIRDFDALRRALQYLGGQPPEATWEEVGHRLQELGFEPGWGRTVARMRDTLRLLMDILDSPSPETLERFLGRIPMIFSIAILSPHGYFGQANVLGLPDTGGQVVYILDQVRALEKEMRRRLHEQGLDIEPQILVVTRLIPEAGGTTCDQRLEPIVGTRNARILRVPFRNEDGEVIPHWISRFEVWPYLERFALDVERELLAELGGRPDLIIGNYSDGNLVATLLAQKLGVTQCNIAHALEKTKYLYSDLYWKENEEQYHFSCQFTADLIAMNAADFIITSTYQEIAGTDDSVGQYESYSAFTMPGLYRVVNGIDVFDPKFNIVSPGADAEVYFPYTETERRLTGLHPEIEELVFGGEDRPDARGVLADPDKPLLFTVARLDRIKNITGLVEWYGRSERLREQANLLVVAGHVDAAKSDDREEREQIARMHELMDEYGLDGQVRWLGVHLDKNLVGELYRYVADRRGAFVQPALFEAFGLTVIEAMSSGLPTFATCYGGPLEIIEDGVSGFHIDPNHGEEAAEIIADFFERCAKEPGYWERISQGALERVRSRYTWELYAERMMTLSRIYGFWKYVTNRERQVTRRYLQMFRHLQFRPLAHAVPLE

SEQ ID NO: 126 - protein, 793 aa, synthetic construct
MIESLREFLSQHRDALYLLLRRYLGLGRPFLLRSDLWDEFERFCEEDGEEEGLLDSPLARAISATQEAVLDAPWIYLAVRPRVARWEYLRFHLETLDVEEIPVSEFLAFKERLVNGDGEGEAVLEVDLGDFNREFQKLKDESTIGRGVEHLNRHLSGRLWQDLGKGDQRLLEFLRVHQYRGQQLMLNDRIKDFDALRRALQYLGRQPPEAPWAEVAHELQALGFEPGWGRTAARMRETLRLLMDILDSPSPENLERFLGRIPMIFSIAILSPHGYFGQSNVLGLPDTGGQVVYILDQVRALEREMRQRLAEQGLDIEPQILVVTRLIPEAGGTTCDQRLEPIVGTRNARILRVPFRNEDGEVIPHWISRFEVWPYLERFALDVERELLAELGGRPDLIIGNYSDGNLVATLLAQKLGVTQCNIAHALEKTKYLYSDLYWRDNEEQYHFSCQFTADLIAMNAADFIITSTYQEIAGTDDSVGQYESYAAFTMPGLYRVVNGIDVFDPKFNIVSPGADAEVYFPYTETERRLTGLHPEIEELIYGGEPRPDARGVLADRDKPLLFTVARLDRIKNITGLVEWYGRSERLRELANLLVVAGHVDPAQSSDREERAQIARMHELMDEYGLDGQVRWLGVHLDKNLVGELYRYIADRRGAFVQPALFEAFGLTVIEAMSSGLPTFATCYGGPLEIIEDGVSGFHIDPNHGEEAAELIADFFERCASDPGYWERISQAALERVEARYTWELYAERMMTLSRIYGFWKYVTNRERQVTRRYLQMFRHLQYRPLAHAVPLE

SEQ ID NO: 127 - protein, 793 aa, synthetic construct
MIEVLRQQLLDSPRSWRAFLRHLVASQRDSWLHTDLQHACKTFREQPPEGYPEDIGWLADFIAHCQEAIFRDPWMVFAWRLRPGVWEYVRIHVEQLAVEELSTDEYLQAKEQLVGLGAEGEAVLTVDFEDFRPVSQRLKDESTIGDGLTHLNRHLAGRIWTDLAAGRSAILEFLGLHRLDNQNLMLSNGNTDFDSLRQTVQYLGTLPRETPWAEFREDMRRRGFEPGWGNTAGRVRETMRLLMDLLDSPSPAALESFLDRIPMISNVLIVSIHGWFAQDKVLGRPDTGGQVVYILDQARALEREMRNRLRQQGVDVEPRILIATRLIPESDGTTCDQRLEPVHGAENVQILRVPFRYEDGRIHPHWISRFKVWPYLERYARDLEREVKAELGSRPDLIIGNYSDGGLVATILSEKLGVTQCNIAHALEKSKYPGSDLHWPLYEQDHHFACQFTADLIAMNAADIIVTSTYQEIAGNDREVGQYESHQDYTLPGLYRVENGIDVFDSKFNIVSPGADPSTYFSYARHEERFSSLWPEIESLLFGREPGPDIRGVLEDPQKPIWLSVGRLDRIKNLSGLLELWGRSARLRSLANLVIIGGHADVQASMDAEEREELRRIHEILDRYQLDGQFRWVGSHLDKRVVGELYRVVADGRGWFIQPALFEAFGLTVIEAMSSGLPVWATRHGGPLEIIEDGVSGFHIDPNDPEAVVEKWADVIEAARERPKYWEEISQAALARVSERYTWERYAERLMTIARCFGFWRFVLSRESQVMERYLQMFRHLQWRPLAHAVPME

SEQ ID NO: 128 - protein, 793 aa, synthetic construct
MIEVLRQQLLDSPRSWRAFLRHLVASQRDSWLHTDLQHACKTFREQPPEGYPEDIGWLADFIAHCQEAIFRDPWMVFAWRLRPGVWEYVRIHVEQLAVEELSTDEYLQAKEQLVGLGAEGEAVLTVDFEDFRPVSQRLKDESTIGDGLTHLNRHLAGRIWTDLAAGRSAILEFLGLHRLDNQNLMLSNGNTDFDSLRQTVQYLGTLPRETPWAEFREDMRRRGFEPGWGNTAGRVRETMRLLMDLLDSPSPAALESFLDRIPMISNVLIVSIHGWFAQDKVLGRPDTGGQVVYILDQARALEREMRNRLRQQGVDVEPRILIATRLIPESDGTTCDQRLEPVHGAENVQILRVPFRYEDGRIHPHWISRFKVWPYLERYARDLEREVKAELGSRPDLIIGNYSDGGLVATILSEKLGVTQCNIAHALEKSKYPGSDLHWPLYEQDHHFACQFTADLIAMNAADIIVTSTYQEIAGNDREVGQYESHQDYTLPGLYRVENGIDVFDSKFNIVSPGADPSTYFSYARHEERFSSLWPEIESLLFGREPGPDIRGVLEDPQKPIILSVGRLDRIKNLSGLLELWGRSARLRSLANLVIIGGHIDVQASMDAEEREEIRRLHEILDRYQLDGQVRIVGSHLDKRVVGELYRVVADGRGMFIQPALFEAFGLTVIEAMSSGLPVWATRHGGPLEIIEDGVSGFHIDPNDPEAVVEKWADWIEAARERPKYWEEISQAALARVSERYTWERYAERLMTIARCFGFWRFVLSRESQVMERYLQMFRHLQWRPLAHAVPME

SEQ ID NO: 129 - protein, 793 aa, synthetic construct
MIEVLRQQLLDSPRSWRAFLRHLVASQRDSWLHTDLQHACKTFREQPPEGYPEDIGWLADFIAHCQEAIFRDPWMVFAWRLRPGVWEYVRIHVEQLAVEELSTDEYLQAKEQLVGLGAEGEAVLTVDFEDFRPVSQRLKDESTIGDGLTHLNRHLAGRIWTDLAAGRSAILEFLGLHRLDNQNLMLSNGNTDFDSLRQTVQYLGTLPRETPWAEFREDMRRRGFEPGWGNTAGRVRETMRLLMDLLDSPSPAALESFLDRIPMISNVLIVSIHGWFAQDKVLGRPDTGGQVVYILDQARALEREMRNRLRQQGVDVEPRILIATRLIPESDGTTCDQRLEPVHGAENVQILRVPFRYEDGRIHPHWISRFKVWPYLERYARDLEREVKAELGSRPDLIIGNYSDGGLVATILSEKLGVTQCNIAHALEKSKYPGSDLHWPLYEQDHHFACQFTADLIAMNAADIIVTSTYQEIAGNDREVGQYESHQDYTLPGLYRVENGIDVFDSKFNIVSPGADPSTYFSYARHEERFSSLWPEIESLLFGREPGPDIRGVLEDPQKPIILSVGRLDRIKNLSGLLELYGRSARLRSLANLVIIGGHVDVQASMDAEEREELRRLHEILDRYQLDGQVRLVGSHLDKRVVGELYRVVADGRGIFIQPALFEAFGLTVIEAMSSGLPVWATRHGGPLEIIEDGVSGFHIDPNDPEAVVEKWADWWEAARERPKYWEEISQAALARVSERYTWERYAERLMTIARCFGFWRFVLSRESQVMERYLQMFRHLQWRPLAHAVPME

SEQ ID NO: 130 - protein, 793 aa, synthetic construct
MIEVLRQQLLDSPRSWRAFLRHLVASQRDSWLHTDLQHACKTFREQPPEGYPEDIGWLADFIAHCQEAIFRDPWMVFAWRLRPGVWEYVRIHVEQLAVEELSTDEYLQAKEQLVGLGAEGEAVLTVDFEDFRPVSQRLKDESTIGDGLTHLNRHLAGRIWTDLAAGRSAILEFLGLHRLDNQNLMLSNGNTDFDSLRQTVQYLGTLPRETPWAEFREDMRRRGFEPGWGNTAGRVRETMRLLMDLLDSPSPAALESFLDRIPMISNVLIVSIHGWFAQDKVLGRPDTGGQVVYILDQARALEREMRNRLRQQGVDVEPRILIATRLIPESDGTTCDQRLEPVHGAENVQILRVPFRYEDGRIHPHWISRFKVWPYLERYARDLEREVKAELGSRPDLIIGNYSDGGLVATILSEKLGVTQCNIAHALEKSKYPGSDLHWPLYEQDHHFACQFTADLIAMNAADIIVTSTYQEIAGNDREVGQYESHQDYTLPGLYRVENGIDVFDSKFNIVSPGADPSTYFSYARHEERFSSLWPEIESLLFGREPGPDIRGVLEDPQKPIILSVARTDRIKNLSGLLELYGRSARLRSLANLVVIGGHVDVQASMDAEEREENRRAHEIMDRYQLDGQTRLVGSHLDKRVVGELYRVVADGRGIFVQPALFEAFGLTVIEAMSSGLPVFATRHGGPLEIIEDGVSGFHIDPNDPEAVAEKIADFLEAARERPKYWEEISQAALARVSERYTWERYAERLMTIARCFGFWRFVLSRESQVMERYLQMFRHLQWRPLAHAVPME

SEQ ID NO: 131 - protein, 793 aa, synthetic construct
MIEVLRQQLLDSPRSWRAFLRHLVASQRDSWLHTDLQHACKTFREQPPEGYPEDIGWLADFIAHCQEAIFRDPWMVFAWRLRPGVWEYVRIHVEQLAVEELSTDEYLQAKEQLVGLGAEGEAVLTVDFEDFRPVSQRLKDESTIGDGLTHLNRHLAGRIWTDLAAGRSAILEFLGLHRLDNQNLMLSNGNTDFDSLRQTVQYLGTLPRETPWAEFREDMRRRGFEPGWGNTAGRVRETMRLLMDLLDSPSPAALESFLDRIPMISNVLIVSIHGWFAQDKVLGRPDTGGQVVYILDQARALEREMRNRLRQQGVDVEPRILIATRLIPESDGTTCDQRLEPVHGAENVQILRVPFRYEDGRIHPHWISRFKVWPYLERYARDLEREVKAELGSRPDLIIGNYSDGGLVATILSEKLGVTQCNIAHALEKSKYPGSDLHWPLYEQDHHFACQFTADLIAMNAADIIVTSTYQEIAGNDREVGQYESHQDYTLPGLYRVENGIDVFDSKFNIVSPGADPSTYFSYARHEERFSSLWPEIESLLFGREPGPDIRGVLEDPQKPIILSVARTDRIKNLSGLLELYGRSARLRSLANLVVIGGHVDVQASMDAEEREEIRRAHEIMDRYQLDGQTRLVGSHLDKRVVGELYRVVADGRGIFVQPALFEAFGLTVIEAMSSGLPVFATRHGGPLEIIEDGVSGFHIDPNDPEAVAEKIADFLEAARERPKYWEEISQAALARVSERYTWERYAERLMTIARCFGFWRFVLSRESQVMERYLQMFRHLQWRPLAHAVPME

SEQ ID NO: 132 - protein, 793 aa, synthetic construct
MIEVLRQQLLDSPRSWRAFLRHLVASQRDSWLHTDLQHACKTFREQPPEGYPEDIGWLADFIAHCQEAIFRDPWMVFAWRLRPGVWEYVRIHVEQLAVEELSTDEYLQAKEQLVGLGAEGEAVLTVDFEDFRPVSQRLKDESTIGDGLTHLNRHLAGRIWTDLAAGRSAILEFLGLHRLDNQNLMLSNGNTDFDSLRQTVQYLGTLPRETPWAEFREDMRRRGFEPGWGNTAGRVRETMRLLMDLLDSPSPAALESFLDRIPMISNVLIVSIHGWFAQDKVLGRPDTGGQVVYILDQARALEREMRNRLRQQGVDVEPRILIATRLIPESDGTTCDQRLEPVHGAENVQILRVPFRYEDGRIHPHWISRFKVWPYLERYARDLEREVKAELGSRPDLIIGNYSDGGLVATILSEKLGVTQCNIAHALEKSKYPGSDLHWPLYEQDHHFACQFTADLIAMNAADIIVTSTYQEIAGNDREVGQYESHQDYTLPGLYRVENGIDVFDSKFNIVSPGADPSTYFSYARHEERFSSLWPEIESVVFGREPGPDIRGVLEDPQKPIILSIARMDRIKNLSGLAELYGRSARLRSLANLIIIGGHVDVQASMDAEEREEIRRMHEIMDRYQLDGQMRWIGSHLDKRWVGEWYRWIADGRGVWVQPALFEAFGLTVIEVMSSGLPVFATRHGGPLEIIEDGVSGFHIDPNDPEAVAEKLADFLEAARERPKYWEEISQAALARVSERYTWERYAERLMTIARCFGFWRFVLSRESQVMERYLQMFRHLQWRPLAHAVPME

SEQ ID NO: 133 - protein, 793 aa, synthetic construct
MIEVLRQQLLDSPRSWRAFLRHLVASQRDSWLHTDLQHACKTFREQPPEGYPEDIGWLADFIAHCQEAIFRDPWMVFAWRLRPGVWEYVRIHVEQLAVEELSTDEYLQAKEQLVGLGAEGEAVLTVDFEDFRPVSQRLKDESTIGDGLTHLNRHLAGRIWTDLAAGRSAILEFLGLHRLDNQNLMLSNGNTDFDSLRQTVQYLGTLPRETPWAEFREDMRRRGFEPGWGNTAGRVRETMRLLMDLLDSPSPAALESFLDRIPMISNVLIVSIHGWFAQDKVLGRPDTGGQVVYILDQARALEREMRNRLRQQGVDVEPRILIATRLIPESDGTTCDQRLEPVHGAENVQILRVPFRYEDGRIHPHWISRFKVWPYLERYARDLEREVKAELGSRPDLIIGNYSDGGLVATILSEKLGVTQCNIAHALEKSKYPGSDLHWPLYEQDHHFACQFTADLIAMNAADIIVTSTYQEIAGNDREVGQYESHQDYTLPGLYRVENGIDVFDSKFNIVSPGADPSTYFSYARHEERFSSLWPEIESVIFGREPGPDIRGVLEDPQKPIILSIARMDRIKNLSGLAELYGRSARLRSLANLIIIGGHVDVQASMDAEEREEIRRMHEIMDRYQLDGQMRWIGSHLDKRWVGEWYRVIADGRGVWVQPALFEAFGLTVIEVMSSGLPVFATRHGGPLEIIEDGVSGFHIDPNDPEAVAEKLADFLEAARERPKYWEEISQAALARVSERYTWERYAERLMTIARCFGFWRFVLSRESQVMERYLQMFRHLQWRPLAHAVPME

SEQ ID NO: 134 - protein, 793 aa, synthetic construct
MIEVLRQQLLDSPRSWRAFLRHLVASQRDSWLHTDLQHACKTFREQPPEGYPEDIGWLADFIAHCQEAIFRDPWMVFAWRLRPGVWEYVRIHVEQLAVEELSTDEYLQAKEQLVGLGAEGEAVLTVDFEDFRPVSQRLKDESTIGDGLTHLNRHLAGRLWTDLAAGRSAILEWLGLHRIDNQNYWLSNGNTDWDSIRQILQYLGTLPRETPWAEFREDWRRRGWEPGWGNTAGRIRETLRIWWDLMDSPSPAAWESWLDRLPLISNVLIVSIHGWFAQDKVLGRPDTGGQVVYILDQARALEREMRNRLRQQGIDVEPRILIATRLIPESDGTTCDQRLEPVHGAENVQILRVPFRYEDGRIHPHWISRFKVWPYLERYARDLEREVKAELGSRPDLIIGNYSDGGLVATILSEKLGVTQCNIAHALEKSKYPGSDLHWPLYEQDHHFACQFTADLIAMNAADIIVTSTYQEIAGNDREVGQYESHQDYTLPGLYRVENGIDVFDSKFNIVSPGADPSTYFSYARHEERFSSLWPEIESLLFGREPGPDIRGVLEDPQKPIILSVARMDRIKNLSGLAELYGRSARLRSLANLVIIGGHVDVQASMDAEEREEIRRMHEIMDRYQLDGQMRWVGSHLDKRVVGELYRVVADGRGVFVQPALFEAFGLTVIEAMSSGLPVFATRHGGPLEIIEDGVSGFHIDPNDPEAVAEKLADFLEAARERPKYWEEISQAALARVSERYTWERYAERLMTIARLFGFWRFLLSRESQVMERYLQMFRHLQWRPLAHAVPME

SEQ ID NO: 135 - protein, 793 aa, synthetic construct
MIEVLRQQLLDSPRSWRAFLRHLVASQRDSWLHTDLQHACKTFREQPPEGYPEDIGWLADFIAHCQEAIFRDPWMVFAWRLRPGVWEYVRIHVEQLAVEELSTDEYLQAKEQLVGLGAEGEAVLTVDFEDFRPVSQRLKDESTIGDGLTHLNRHIAGRLWTDLAAGRSALLEWLGLHRIDNQNLWLSNGNTDLDSLRQILQYLGTLPRETPWAEFREDWRRRGWEPGWGNTAGRVRETLRIWWDLMDSPSPAALESWLDRLPLISNVLIVSIHGWFAQDKVLGRPDTGGQVVYILDQARALEREMRNRLRQQGIDIEPRILIATRLIPESDGTTCDQRLEPVHGAENVQILRVPFRYEDGRIHPHWISRFKVWPYLERYARDLEREVKAELGSRPDLIIGNYSDGGLVATILSEKLGVTQCNIAHALEKSKYPGSDLHWPLYEQDHHFACQFTADLIAMNAADIIVTSTYQEIAGNDREVGQYESHQDYTLPGLYRVENGIDVFDSKFNIVSPGADPSTYFSYARHEERFSSLWPEIESLLFGREPGPDIRGVLEDPQKPIILSVARMDRIKNLSGLAELYGRSARLRSLANLVIIGGHVDVQASMDAEEREEIRRMHEIMDRYQLDGQMRWVGSHLDKRVVGELYRVVADGRGVFVQPALFEAFGLTVIEAMSSGLPVFATRHGGPLEIIEDGVSGFHIDPNDPEAVAEKLADFLEAARERPKYWEEISQAALARVSERYTWERYAERLMTIARVFGFWRFILSRESQVMERYLQMFRHLQWRPLAHAVPME

SEQ ID NO: 136 - protein, 793 aa, synthetic construct
MIEVLRQQLLDSPRSWRAFLRHLVASQRDSWLHTDLQHACKTFREQPPEGYPEDIGWLADFIAHCQEAIFRDPWMVFAWRLRPGVWEYVRIHVEQLAVEELSTDEYLQAKEQLVGLGAEGEAVLTVDFEDFRPVSQRLKDESTIGDGLTHLNRHLAGRIWTDLAAGRSAILEFLGLHRLDNQNLMLSNGNTDFDSLRQTVQYLGTLPRETPWAEFREDMRRRGFEPGWGNTAGRVRETMRLLMDLLDSPSPAALESFLDRIPMISNILIVSIHGWFAQDKVLGRPDTGGQVVWILDQARALEREIRNRLRQQGVDVEPRILIATRLIPESDGTTCDQRLEPVHGAENVQILRVPFRYEDGRIHPHWISRFKVWPYLERYARDLEREVKAELGSRPDIIIGNYSDGGLVATILSEKLGVTQLNFAHALEKSKYPGSDLHWPLYEQDHHFACQFTADLIAMNAADVIVTSTYQEIAGNDREVGQYESHQDYTLPGLYRVENGIDVFDSKFNIISPGADPSTYFSYARHEERFSSLWPEIESLLFGREPGPDIRGVLEDPQKPIILSVARMDRIKNLSGLAELYGRSARLRSLANLVIIGGHVDVQASMDAEEREEIRRMHEIMDRYQLDGQMRWVGSHLDKRVVGELYRVVADGRGVFVQPALFEAFGLTVIEAMSSGLPVFATRHGGPLEIIEDGVSGFHIDPNDPEAVAEKLADFLEAARERPKYWEEISQAALARVSERYTWERWAERLLTLWRCLGFWRFVLSRESQVMERYLQMFRHLQWRPLAHAVPME

SEQ ID NO: 137 - protein, 793 aa, synthetic construct
MIEVLRQQLLDSPRSWRAFLRHLVASQRDSWLHTDLQHACKTFREQPPEGYPEDIGWLADFIAHCQEAIFRDPWMVFAWRLRPGVWEYVRIHVEQLAVEELSTDEYLQAKEQLVGLGAEGEAVLTVDFEDFRPVSQRLKDESTIGDGLTHLNRHLAGRIWTDLAAGRSAILEFLGLHRLDNQNLMLSNGNTDFDSLRQTVQYLGTLPRETPWAEFREDMRRRGFEPGWGNTAGRVRETMRLLMDLLDSPSPAALESFLDRIPMISNVIIISIHGWFAQDKVLGRPDTGGQVVYILDQARALEREMRNRLRQQGVDVEPRIIILTRLIPESDGTTCDQRLEPVHGAENVQILRIPFRYEDGRIHPHWISRFKVWPYLERWVRDVEREIKAELGSRPDLIIGNYSDGGLIATIMSEKWGVTQCNIAHALEKSKYPGSDLHWPLYEQDHHFACQFTADLIAMNAADIIVTSTYQEIAGNDREVGQYESHQDYTLPGLYRVENGIDVFDSKFNIVSPGADPSTYFSYARHEERFSSLWPEIESLLFGREPGPDIRGVLEDPQKPIILSVARMDRIKNLSGLAELYGRSARLRSLANLVIIGGHVDVQASMDAEEREEIRRMHEIMDRYQLDGQMRWVGSHLDKRVVGELYRVVADGRGVFVQPALFEAFGLTVIEAMSSGLPVFATRHGGPLEIIEDGVSGFHIDPNDPEAVAEKLADFLEAARERPKYWEEISQAALARVSERYTWERYAERLMTIARCFGFWRFVLSRESQVMERYLQMFRHLQWRPLAHAVPME

SEQ ID NO: 138 - protein, 793 aa, synthetic construct
MIEVLRQQLLDSPRSWRAFLRHLVASQRDSWLHTDLQHACKTFREQPPEGYPEDIGWLADFIAHCQEAIFRDPWMVFAWRLRPGVWEYVRIHVEQLAVEELSTDEYLQAKEQLVGLGAEGEAVLTVDFEDFRPVSQRLKDESTIGDGLTHLNRHLAGRIWTDLAAGRSAILEFLGLHRLDNQNLMLSNGNTDFDSLRQTVQYLGTLPRETPWAEFREDMRRRGFEPGWGNTAGRVRETMRLLMDLLDSPSPAALESFLDRIPMISNVIIISVHGWFAQDKVLGRPDTGGQVVYILDQARALEREMRNRLRQQGVDVEPRILIITRLIPESDGTTCDQRLEPVHGAENVQILRIPFRYEDGRIHPHWISRFKVWPYLERWVRDVEREIKAELGSRPDLIIGNYSDGGLIATIMSEKWGVTQCNIAHALEKSKYPGSDLHWPLYEQDHHFACQFTADLIAMNAADIIVTSTYQEIAGNDREVGQYESHQDYTLPGLYRVENGIDVFDSKFNIVSPGADPSTYFSYARHEERFSSLWPEIESLLFGREPGPDIRGVLEDPQKPIILSVARMDRIKNLSGLAELYGRSARLRSLANLVIIGGHVDVQASMDAEEREEIRRMHEIMDRYQLDGQMRWVGSHLDKRVVGELYRVVADGRGVFVQPALFEAFGLTVIEAMSSGLPVFATRHGGPLEIIEDGVSGFHIDPNDPEAVAEKLADFLEAARERPKYWEEISQAALARVSERYTWERYAERLMTIARCFGFWRFVLSRESQVMERYLQMFRHLQWRPLAHAVPME

SEQ ID NO: 139 - protein, 793 aa, synthetic construct
MIEVLRQQLLDSPRSWRAFLRHLVASQRDSWLHTDLQHACKTFREQPPEGYPEDIGWLADFIAHCQEAIFRDPWMVFAWRLRPGVWEYVRIHVEQLAVEELSTDEYLQAKEQLVGLGAEGEAVWTIDWEDLRPVSQRLKDESTIGDGLTHLNRHLAGRIWTDLAAGRSAILEFLGLHRLDNQNLMLSNGNTDFDSLRQTVQYLGTLPRETPWAEFREDMRRRGFEPGWGNTAGRVRETMRLLMDLLDSPSPAALESFLDRIPMISNVLIVSIHGWFAQDKVLGRPDTGGQVVYILDQARALEREMRNRLRQQGVDVEPRILIATRLIPESDGTTCDQRLEPVHGAENVQILRVPFRYEDGRIHPHWISRFKVWPYLERYARDLEREVKAELGSRPDLIIGNYSDGGLVATILSEKLGVTQCNIAHALEKSKYPGSDLHWPLYEQDHHFACQFTADLIAMNAADIIVTSTYQEIAGNDREVGQYESHQDYTLPGLYRIENGIDVFDSKFNIVSPGADPSTYFSYARHEERFSSLWPEIESLLFGREPGPDIRGVLEDPQKPIILSVARMDRIKNLSGLAELYGRSARLRSLANLVIIGGHVDVQASMDAEEREEIRRMHEIMDRYQLDGQMRWVGSHLDKRVVGELYRVVADGRGVFVQPALFEAFGLTVIEAMSSGLPVFATRHGGPLEIIEDGVSGFHIDPNDPEAVAEKLADFLEAARERPKYWEEISQAALARVSERYTWERYAERLMTIARCFGFWRFVLSRESQVMERYLQMIRHLQWRPLAHAVPME

SEQ ID NO: 140 - protein, 793 aa, synthetic construct
MIEVLRQQLLDSPRSWRAFLRHLVASQRDSWLHTDLQHACKTFREQPPEGYPEDIGWLADFIAHCQEAIFRDPWMVFAWRLRPGVWEYVRIHVEQLAVEELSTDEYLQAKEQLVGLGAEGEAVLTVDFEDFRPVSQRLKDESTIGDGLTHLNRHLAGRIWTDLAAGRSAILEFLGLHRLDNQNLMLSNGNTDFDSLRQTVQYLGTLPRETPWAEFREDMRRRGFEPGWGNTAGRVRETMRLLMDLLDSPSPAALESFLDRIPMISNVLIVSIHGWFAQDKVLGRPDTGGQVVYILDQARALEREMRNRLRQQGVDVEPRILIATRLIPESDGTTCDQRLEPVHGAENVQILRVPFRYEDGRIHPHWISRFKVWPYLERYARDLEREVKAELGSRPDLIIGNYSDGGLVATILSEKLGVTQCNIAHALEKSKYPGSDLHWPLYEQDHHFACQFTADLIAMNAADIIVTSTYQEIAGNDREVGQYESHQDYTLPGLYRVENGIDVFDSKFNIVSPGADPSTYFSYARHEERFSSLWPEIESLLFGREPGPDIRGVLEDPQKPIILSVMRWDRIKNISGLLEMWGRSARLRSLANVVLIGGHLDVQASMDAEEREEIRRLHEIMDRYQLDGQVRWVGSHLDKRVVGELYRVVADGRGIFIQPALFEAFGLTVIEAMSSGLPVWATRHGGPLEIIEDGVSGFHIDPNDPEAVLEKIADWLEAARERPKYWEEISQAALARVSERYTWERYAERLMTIARCFGFWRFVLSRESQVMERYLQMFRHLQWRPLAHAVPME

SEQ ID NO: 141 - protein, 793 aa, synthetic construct
MIEVLRQQLLDSPRSWRAFLRHLVASQRDSWLHTDLQHACKTFREQPPEGYPEDIGWLADFIAHCQEAIFRDPWMVFAWRLRPGVWEYVRIHVEQLAVEELSTDEYLQAKEQLVGLGAEGEAVLTVDFEDFRPVSQRLKDESTIGDGLTHLNRHLAGRIWTDLAAGRSAILEFLGLHRLDNQNLMLSNGNTDFDSLRQTVQYLGTLPRETPWAEFREDMRRRGFEPGWGNTAGRVRETMRLLMDLLDSPSPAALESFLDRIPMISNVLIVSIHGWFAQDKVLGRPDTGGQVVYILDQARALEREMRNRLRQQGVDVEPRILIATRLIPESDGTTCDQRLEPVHGAENVQILRVPFRYEDGRIHPHWISRFKVWPYLERYARDLEREVKAELGSRPDLIIGNYSDGGLVATILSEKLGVTQCNIAHALEKSKYPGSDLHWPLYEQDHHFACQFTADLIAMNAADIIVTSTYQEIAGNDREVGQYESHQDYTLPGLYRVENGIDVFDSKFNIVSPGADPSTYFSYARHEERFSSLWPEIESLLFGREPGPDIRGVLEDPQKPIVLSVMRLDRIKNLSGLLEWWGRSARLRSLANLVIIGGHVDVQASMDAEEREELRRMHEILDRYQLDGQVRWVGSHLDKRVVGELYRVVADGRGIFIQPALFEAFGLTVIEAMSSGLPVWATRHGGPLEIIEDGVSGFHIDPNDPEAVLEKWADVWEAARERPKYWEEISQAALARVSERYTWERYAERLMTIARCFGFWRFVLSRESQVMERYLQMFRHLQWRPLAHAVPME

SEQ ID NO: 142 - protein, 793 aa, synthetic construct
MIEVLRQQLLDSPRSWRAFLRHLVASQRDSWLHTDLQHACKTFREQPPEGYPEDIGWLADFIAHCQEAIFRDPWMVFAWRLRPGVWEYVRIHVEQLAVEELSTDEYLQAKEQLVGLGAEGEAVLTVDFEDFRPVSQRLKDESTIGDGLTHLNRHLAGRIWTDLAAGRSAILEFLGLHRLDNQNLMLSNGNTDFDSLRQTVQYLGTLPRETPWAEFREDMRRRGFEPGWGNTAGRVRETMRLLMDLLDSPSPAALESFLDRIPMISNVLIVSIHGWFAQDKVLGRPDTGGQVVYILDQARALEREMRNRLRQQGVDVEPRILIATRLIPESDGTTCDQRLEPVHGAENVQILRVPFRYEDGRIHPHWISRFKVWPYLERYARDLEREVKAELGSRPDLIIGNYSDGGLVATILSEKLGVTQCNIAHALEKSKYPGSDLHWPLYEQDHHFACQFTADLIAMNAADIIVTSTYQEIAGNDREVGQYESHQDYTLPGLYRVENGIDVFDSKFNIVSPGADPSTYFSYARHEERFSSLWPEIESLLFGREPGPDIRGVLEDPQKPIVLSVARLDRIKNLSGLLEWWGRSARLRSLANWVIIGGHLDVQASMDAEEREEIRRLHEILDRYQLDGQVRWVGSHLDKRVVGELYRVVADGRGVFIQPALFEAFGLTVIEAMSSGLPVWATRHGGPLEIIEDGVSGFHIDPNDPEAVLEKWADWWEAARERPKYWEEISQAALARVSERYTWERYAERLMTIARCFGFWRFVLSRESQVMERYLQMFRHLQWRPLAHAVPME

SEQ ID NO: 143 - protein, 793 aa, synthetic construct
MIEVLRQQLLDSPRSWRAFLRHLVASQRDSWLHTDLQHACKTFREQPPEGYPEDIGWLADFIAHCQEAIFRDPWMVFAWRLRPGVWEYVRIHVEQLAVEELSTDEYLQAKEQLVGLGAEGEAVLTVDFEDFRPVSQRLKDESTIGDGLTHLNRHLAGRIWTDLAAGRSAILEFLGLHRLDNQNLMLSNGNTDFDSLRQTVQYLGTLPRETPWAEFREDMRRRGFEPGWGNTAGRVRETMRLLMDLLDSPSPAALESFLDRIPMISNVLIVSIHGWFAQDKVLGRPDTGGQVVYILDQARALEREMRNRLRQQGVDVEPRILIATRLIPESDGTTCDQRLEPVHGAENVQILRVPFRYEDGRIHPHWISRFKVWPYLERYARDLEREVKAELGSRPDLIIGNYSDGGLVATILSEKLGVTQCNIAHALEKSKYPGSDLHWPLYEQDHHFACQFTADLIAMNAADIIVTSTYQEIAGNDREVGQYESHQDYTLPGLYRVENGIDVFDSKFNIVSPGADPSTYFSYARHEERFSSLWPEIESLLFGREPGPDIRGVLEDPQKPILLSVMRLDRIKNLSGLLELWGRSARLRSLANLVLIGGHVDVQASMDAEEREEIRRLHEILDRYQLDGQVRWVGSHLDKRVVGELYRVVADGRGWFVQPALFEAFGLTVIEAMSSGLPVWATRHGGPLEIIEDGVSGFHIDPNDPEAVLEKWADVWEAARERPKYWEEISQAALARVSERYTWERYAERLMTIARCFGFWRFVLSRESQVMERYLQMFRHLQWRPLAHAVPME

SEQ ID NO: 144 - protein, 793 aa, synthetic construct
MIEVLRQQLLDSPRSWRAFLRHLVASQRDSWLHTDLQHACKTFREQPPEGYPEDIGWLADFIAHCQEAIFRDPWMVFAWRLRPGVWEYVRIHVEQLAVEELSTDEYLQAKEQLVGLGAEGEAVLTVDFEDFRPVSQRLKDESTIGDGLTHLNRHLAGRIWTDLAAGRSAILEFLGLHRLDNQNLMLSNGNTDFDSLRQTVQYLGTLPRETPWAEFREDMRRRGFEPGWGNTAGRVRETMRLLMDLLDSPSPAALESFLDRIPMISNVLIVSIHGWFAQDKVLGRPDTGGQVVYILDQARALEREMRNRLRQQGVDVEPRILIATRLIPESDGTTCDQRLEPVHGAENVQILRVPFRYEDGRIHPHWISRFKVWPYLERYARDLEREVKAELGSRPDLIIGNYSDGGLVATILSEKLGVTQCNIAHALEKSKYPGSDLHWPLYEQDHHFACQFTADLIAMNAADIIVTSTYQEIAGNDREVGQYESHQDYTLPGLYRVENGIDVFDSKFNIVSPGADPSTYFSYARHEERFSSLWPEIESMVFGREPGPDIRGVLEDPQKPLILSIARMDRIKNLSGLAELYGRSARLRSLANLIIWGGHVDVQASMDAEEREEIRRMHEIMDRYQLDGQMRWIGSHLDKRIVGEWYRWLADGRGVVVQPALFEAFGLTVIELMSSGLPVFATRHGGPLEIIEDGVSGFHIDPNDPEAVAEKLADFLEAARERPKYWEEISQAALARVSERYTWERYAERLMTIARCFGFWRFVLSRESQVMERYLQMFRHLQWRPLAHAVPME

SEQ ID NO: 145 - protein, 793 aa, synthetic construct
MIEVLRQQLLDSPRSWRAFLRHLVASQRDSWLHTDLQHACKTFREQPPEGYPEDIGWLADFIAHCQEAIFRDPWMVFAWRLRPGVWEYVRIHVEQLAVEELSTDEYLQAKEQLVGLGAEGEAVLTVDFEDFRPVSQRLKDESTIGDGLTHLNRHLAGRIWTDLAAGRSAILEFLGLHRLDNQNLMLSNGNTDFDSLRQTVQYLGTLPRETPWAEFREDMRRRGFEPGWGNTAGRVRETMRLLMDLLDSPSPAALESFLDRIPMISNVLIVSIHGWFAQDKVLGRPDTGGQVVYILDQARALEREMRNRLRQQGVDVEPRILIATRLIPESDGTTCDQRLEPVHGAENVQILRVPFRYEDGRIHPHWISRFKVWPYLERYARDLEREVKAELGSRPDLIIGNYSDGGLVATILSEKLGVTQCNIAHALEKSKYPGSDLHWPLYEQDHHFACQFTADLIAMNAADIIVTSTYQEIAGNDREVGQYESHQDYTLPGLYRVENGIDVFDSKFNIVSPGADPSTYFSYARHEERFSSLWPEIESIVFGREPGPDIRGVLEDPQKPLILSIARMDRIKNLSGLAELYGRSARLRSLANLWIIGGHVDVQASMDAEEREEIRRMHEIMDRYQLDGQMRWIGSHLDKRWVGELYRWIADGRGVWVQPALFEAFGLTVIEVMSSGLPVFATRHGGPLEIIEDGVSGFHIDPNDPEAVAEKLADFLEAARERPKYWEEISQAALARVSERYTWERYAERLMTIARCFGFWRFVLSRESQVMERYLQMFRHLQWRPLAHAVPME

SEQ ID NO: 146 - protein, 793 aa, synthetic construct
MIEVLRQQLLDSPRSWRAFLRHLVASQRDSWLHTDLQHACKTFREQPPEGYPEDIGWLADFIAHCQEAIFRDPWMVFAWRLRPGVWEYVRIHVEQLAVEELSTDEYLQAKEQLVGLGAEGEAVLTVDFEDFRPVSQRLKDESTIGDGLTHLNRHLAGRIWTDLAAGRSAILEFLGLHRLDNQNLMLSNGNTDFDSLRQTVQYLGTLPRETPWAEFREDMRRRGFEPGWGNTAGRVRETMRLLMDLLDSPSPAALESFLDRIPMISNVLIVSIHGWFAQDKVLGRPDTGGQVVYILDQARALEREMRNRLRQQGVDVEPRILIATRLIPESDGTTCDQRLEPVHGAENVQILRVPFRYEDGRIHPHWISRFKVWPYLERYARDLEREVKAELGSRPDLIIGNYSDGGLVATILSEKLGVTQCNIAHALEKSKYPGSDLHWPLYEQDHHFACQFTADLIAMNAADIIVTSTYQEIAGNDREVGQYESHQDYTLPGLYRVENGIDVFDSKFNIVSPGADPSTYFSYARHEERFSSLWPEIESILFGREPGPDIRGVLEDPQKPLIVSIARMDRIKNLSGLAELYGRSARLRSLANLLIIGGHVDVQASMDAEEREEIRRMHEIMDRYQLDGQMRWMGSHLDKRWVGEWYRWVADGRGVLVQPALFEAFGLTVIEIMSSGLPVFATRHGGPLEIIEDGVSGFHIDPNDPEAVAEKLADFLEAARERPKYWEEISQAALARVSERYTWERYAERLMTIARCFGFWRFVLSRESQVMERYLQMFRHLQWRPLAHAVPME

SEQ ID NO: 147 - protein, 793 aa, synthetic construct
MIEVLRQQLLDSPRSWRAFLRHLVASQRDSWLHTDLQHACKTFREQPPEGYPEDIGWLADFIAHCQEAIFRDPWMVFAWRLRPGVWEYVRIHVEQLAVEELSTDEYLQAKEQLVGLGAEGEAVLTVDFEDFRPVSQRLKDESTIGDGLTHLNRHLAGRIWTDLAAGRSAILEFLGLHRLDNQNLMLSNGNTDFDSLRQTVQYLGTLPRETPWAEFREDMRRRGFEPGWGNTAGRVRETMRLLMDLLDSPSPAALESFLDRIPMISNVLIVSIHGWFAQDKVLGRPDTGGQVVYILDQARALEREMRNRLRQQGVDVEPRILIATRLIPESDGTTCDQRLEPVHGAENVQILRVPFRYEDGRIHPHWISRFKVWPYLERYARDLEREVKAELGSRPDLIIGNYSDGGLVATILSEKLGVTQCNIAHALEKSKYPGSDLHWPLYEQDHHFACQFTADLIAMNAADIIVTSTYQEIAGNDREVGQYESHQDYTLPGLYRVENGIDVFDSKFNIVSPGADPSTYFSYARHEERFSSLWPEIESMVFGREPGPDIRGVLEDPQKPIILSVARMDRIKNLSGLAELYGRSARLRSLANLVIIGGHVDVQASMDAEEREEIRRMHEIMDRYQLDGQMRWQGSHLDKRWVGELYRWVADGRGVAVQPALFEAFGLTVIEQMSSGLPVFATRHGGPLEIIEDGVSGFHIDPNDPEAVAEKLADFLEAARERPKYWEEISQAALARVSERYTWERYAERLMTIARCFGFWRFVLSRESQVMERYLQMFRHLQWRPLAHAVPME

SEQ ID NO: 148 - protein, 793 aa, synthetic construct
MIEVLRQQLLDSPRSWRAFLRHLVASQRDSWLHTDLQHACKTFREQPPEGYPEDIGWLADFIAHCQEAIFRDPWMVFAWRLRPGVWEYVRIHVEQLAVEELSTDEYLQAKEQLVGLGAEGEAVLTVDFEDFRPVSQRLKDESTIGDGLTHLNRHLAGRLWTDVAAGRSAILEWLGLHRIDNQNLWMSNGNTDVDSLRQILQYLGTLPRETPLAELREDWRRRGWEPGWGNTAGRIRETLRILWDLWDSPSPAAWESWLDRVPIISNVLIVSIHGWFAQDKVLGRPDTGGQVVYILDQARALEREMRNRLRQQGIDVEPRILIATRLIPESDGTTCDQRLEPVHGAENVQILRVPFRYEDGRIHPHWISRFKVWPYLERYARDLEREVKAELGSRPDLIIGNYSDGGLVATILSEKLGVTQCNIAHALEKSKYPGSDLHWPLYEQDHHFACQFTADLIAMNAADIIVTSTYQEIAGNDREVGQYESHQDYTLPGLYRVENGIDVFDSKFNIVSPGADPSTYFSYARHEERFSSLWPEIESLLFGREPGPDIRGVLEDPQKPIILSVARMDRIKNLSGLAELYGRSARLRSLANLVIIGGHVDVQASMDAEEREEIRRMHEIMDRYQLDGQMRWVGSHLDKRVVGELYRVVADGRGVFVQPALFEAFGLTVIEAMSSGLPVFATRHGGPLEIIEDGVSGFHIDPNDPEAVAEKLADFLEAARERPKYWEEISQAALARVSERYTWERYAERLMTIARIFGWWRFMLSRESQVMERYLQMFRHLQWRPLAHAVPME

SEQ ID NO: 149 - protein, 793 aa, synthetic construct
MIEVLRQQLLDSPRSWRAFLRHLVASQRDSWLHTDLQHACKTFREQPPEGYPEDIGWLADFIAHCQEAIFRDPWMVFAWRLRPGVWEYVRIHVEQLAVEELSTDEYLQAKEQLVGLGAEGEAVLTVDFEDFRPVSQRLKDESTIGDGLTHLNRHLAGRLWTDLAAGRSALLEWLGLHRIDNQNLWWSNGNTDWDSVRQVLQYLGTIPRETPWAELREDWRRRGWEPGWGNTAGRVRETLRILWDLIDSPSPAALESWLDRIPIISNVLIVSIHGWFAQDKVLGRPDTGGQVVYILDQARALEREMRNRLRQQGIDVEPRILIATRLIPESDGTTCDQRLEPVHGAENVQILRVPFRYEDGRIHPHWISRFKVWPYLERYARDLEREVKAELGSRPDLIIGNYSDGGLVATILSEKLGVTQCNIAHALEKSKYPGSDLHWPLYEQDHHFACQFTADLIAMNAADIIVTSTYQEIAGNDREVGQYESHQDYTLPGLYRVENGIDVFDSKFNIVSPGADPSTYFSYARHEERFSSLWPEIESLLFGREPGPDIRGVLEDPQKPIILSVARMDRIKNLSGLAELYGRSARLRSLANLVIIGGHVDVQASMDAEEREEIRRMHEIMDRYQLDGQMRWVGSHLDKRVVGELYRVVADGRGVFVQPALFEAFGLTVIEAMSSGLPVFATRHGGPLEIIEDGVSGFHIDPNDPEAVAEKLADFLEAARERPKYWEEISQAALARVSERYTWERYAERLMTIARVFGLWRFILSRESQVMERYLQMFRHLQWRPLAHAVPME

SEQ ID NO: 150 - protein, 793 aa, synthetic construct
MIEVLRQQLLDSPRSWRAFLRHLVASQRDSWLHTDLQHACKTFREQPPEGYPEDIGWLADFIAHCQEAIFRDPWMVFAWRLRPGVWEYVRIHVEQLAVEELSTDEYLQAKEQLVGLGAEGEAVLTVDFEDFRPVSQRLKDESTIGDGLTHLNRHLAGRMWTDTAAGRSALLEWLGLHRLDNQNLGLSNGNTDFDSLRQVMQYLGTQPRETPLAELREDLRRRGFEPGLGNTAGRVRETLRLLVDLLDSPSPAALESFLDRVPLISNVLIVSIHGWFAQDKVLGRPDTGGQVVYILDQARALEREMRNRLRQQGVDVEPRILIATRLIPESDGTTCDQRLEPVHGAENVQILRVPFRYEDGRIHPHWISRFKVWPYLERYARDLEREVKAELGSRPDLIIGNYSDGGLVATILSEKLGVTQCNIAHALEKSKYPGSDLHWPLYEQDHHFACQFTADLIAMNAADIIVTSTYQEIAGNDREVGQYESHQDYTLPGLYRVENGIDVFDSKFNIVSPGADPSTYFSYARHEERFSSLWPEIESLLFGREPGPDIRGVLEDPQKPIILSVARMDRIKNLSGLAELYGRSARLRSLANLVIIGGHVDVQASMDAEEREEIRRMHEIMDRYQLDGQMRWVGSHLDKRVVGELYRVVADGRGVFVQPALFEAFGLTVIEAMSSGLPVFATRHGGPLEIIEDGVSGFHIDPNDPEAVAEKLADFLEAARERPKYWEEISQAALARVSERYTWERYAERLMTIARAFGFWRFVLSRESQVMERYLQMFRHLQWRPLAHAVPME

SEQ ID NO: 151 - protein, 793 aa, synthetic construct
MIEVLRQQLLDSPRSWRAFLRHLVASQRDSWLHTDLQHACKTFREQPPEGYPEDIGWLADFIAHCQEAIFRDPWMVFAWRLRPGVWEYVRIHVEQLAVEELSTDEYLQAKEQLVGLGAEGEAVLTVDFEDFRPVSQRLKDESTIGDGLTHLNRHLAGRNWTDNAAGRSAILEFLGLHRLDNQNLTLSNGNTDLDSLRQVLQYLGTLPRETPLAELREDLRRRGWEPGLGNTAGRVRETLRLLTDLLDSPSPAALESFLDRIPMISNVLIVSIHGWFAQDKVLGRPDTGGQVVYILDQARALEREMRNRLRQQGIDVEPRILIATRLIPESDGTTCDQRLEPVHGAENVQILRVPFRYEDGRIHPHWISRFKVWPYLERYARDLEREVKAELGSRPDLIIGNYSDGGLVATILSEKLGVTQCNIAHALEKSKYPGSDLHWPLYEQDHHFACQFTADLIAMNAADIIVTSTYQEIAGNDREVGQYESHQDYTLPGLYRVENGIDVFDSKFNIVSPGADPSTYFSYARHEERFSSLWPEIESLLFGREPGPDIRGVLEDPQKPIILSVARMDRIKNLSGLAELYGRSARLRSLANLVIIGGHVDVQASMDAEEREEIRRMHEIMDRYQLDGQMRWVGSHLDKRVVGELYRVVADGRGVFVQPALFEAFGLTVIEAMSSGLPVFATRHGGPLEIIEDGVSGFHIDPNDPEAVAEKLADFLEAARERPKYWEEISQAALARVSERYTWERYAERLMTIARAFGFWRFVLSRESQVMERYLQMFRHLQWRPLAHAVPME

SEQ ID NO: 152 - protein, 793 aa, synthetic construct
MIEVLRQQLLDSPRSWRAFLRHLVASQRDSWLHTDLQHACKTFREQPPEGYPEDIGWLADFIAHCQEAIFRDPWMVFAWRLRPGVWEYVRIHVEQLAVEELSTDEYLQAKEQLVGLGAEGEAVLTVDFEDFRPVSQRLKDESTIGDGLTHLNRHLAGRIWTDLAAGRSAILEFLGLHRLDNQNLMLSNGNTDFDSLRQTVQYLGTLPRETPWAEFREDMRRRGFEPGWGNTAGRVRETMRLLMDLLDSPSPAALESFLDRIPMISNILWVSIHGWFAQDKVLGRPDTGGQVVLILDQARALEREIRNRLRQQGVDVEPRILWATRLIPESDGTTCDQRLEPVHGAENVQILRVPFRYEDGRIHPHWISRFKVWPYLERYARDLEREVKAELGSRPDVIVGNYSDGGLVATILSEKLGVTQLNMAHALEKSKYPGSDLHWPLYEQDHHFACQFTADLIAMNAADVIVTSTYQEIAGNDREVGQYESHQDYTLPGLYRVENGIDVFDSKFNIISPGADPSTYFSYARHEERFSSLWPEIESLLFGREPGPDIRGVLEDPQKPIILSVARMDRIKNLSGLAELYGRSARLRSLANLVIIGGHVDVQASMDAEEREEIRRMHEIMDRYQLDGQMRWVGSHLDKRVVGELYRVVADGRGVFVQPALFEAFGLTVIEAMSSGLPVFATRHGGPLEIIEDGVSGFHIDPNDPEAVAEKLADFLEAARERPKYWEEISQAALARVSERYTWERWAERILTMWRCWGFWRFVLSRESQVMERYLQMFRHLQWRPLAHAVPME

SEQ ID NO: 153 - protein, 793 aa, synthetic construct
MIEVLRQQLLDSPRSWRAFLRHLVASQRDSWLHTDLQHACKTFREQPPEGYPEDIGWLADFIAHCQEAIFRDPWMVFAWRLRPGVWEYVRIHVEQLAVEELSTDEYLQAKEQLVGLGAEGEAVLTVDFEDFRPVSQRLKDESTIGDGLTHLNRHLAGRIWTDLAAGRSAILEFLGLHRLDNQNLMLSNGNTDFDSLRQTVQYLGTLPRETPWAEFREDMRRRGFEPGWGNTAGRVRETMRLLMDLLDSPSPAALESFLDRIPMISNVLIISVHGWFAQDKVLGRPDTGGQVVYILDQARALEREMRNRLRQQGVDVEPRIIIITRLIPESDGTTCDQRLEPVHGAENVQILRIPFRYEDGRIHPHWISRFKVWPYLERWVRDVEREIKAELGSRPDLIIGNYSDGGLIATILSEKWGITQCNIAHALEKSKYPGSDLHWPLYEQDHHFACQFTADLIAMNAADIIVTSTYQEIAGNDREVGQYESHQDYTLPGLYRVENGIDVFDSKFNIVSPGADPSTYFSYARHEERFSSLWPEIESLLFGREPGPDIRGVLEDPQKPIILSVARMDRIKNLSGLAELYGRSARLRSLANLVIIGGHVDVQASMDAEEREEIRRMHEIMDRYQLDGQMRWVGSHLDKRVVGELYRVVADGRGVFVQPALFEAFGLTVIEAMSSGLPVFATRHGGPLEIIEDGVSGFHIDPNDPEAVAEKLADFLEAARERPKYWEEISQAALARVSERYTWERYAERLMTIARCFGFWRFVLSRESQVMERYLQMFRHLQWRPLAHAVPME

SEQ ID NO: 154 - protein, 793 aa, synthetic construct
MIEVLRQQLLDSPRSWRAFLRHLVASQRDSWLHTDLQHACKTFREQPPEGYPEDIGWLADFIAHCQEAIFRDPWMVFAWRLRPGVWEYVRIHVEQLAVEELSTDEYLQAKEQLVGLGAEGEAVLTVDFEDFRPVSQRLKDESTIGDGLTHLNRHLAGRIWTDLAAGRSAILEFLGLHRLDNQNLMLSNGNTDFDSLRQTVQYLGTLPRETPWAEFREDMRRRGFEPGWGNTAGRVRETMRLLMDLLDSPSPAALESFLDRIPMISNVLIISVHGWFAQDKVLGRPDTGGQVVYILDQARALEREMRNRLRQQGVDVEPRIIIITRLIPESDGTTCDQRLEPVHGAENVQILRIPFRYEDGRIHPHWISRFKVWPYLERWVRDVEREIKAELGSRPDLIIGNYSDGGLIATILSEKLGVTQCNIAHALEKSKYPGSDLHWPLYEQDHHFACQFTADLIAMNAADIIVTSTYQEIAGNDREVGQYESHQDYTLPGLYRVENGIDVFDSKFNIVSPGADPSTYFSYARHEERFSSLWPEIESLLFGREPGPDIRGVLEDPQKPIILSVARMDRIKNLSGLAELYGRSARLRSLANLVIIGGHVDVQASMDAEEREEIRRMHEIMDRYQLDGQMRWVGSHLDKRVVGELYRVVADGRGVFVQPALFEAFGLTVIEAMSSGLPVFATRHGGPLEIIEDGVSGFHIDPNDPEAVAEKLADFLEAARERPKYWEEISQAALARVSERYTWERYAERLMTIARCFGFWRFVLSRESQVMERYLQMFRHLQWRPLAHAVPME

SEQ ID NO: 155 - protein, 793 aa, synthetic construct
MIEVLRQQLLDSPRSWRAFLRHLVASQRDSWLHTDLQHACKTFREQPPEGYPEDIGWLADFIAHCQEAIFRDPWMVFAWRLRPGVWEYVRIHVEQLAVEELSTDEYLQAKEQLVGLGAEGEAVLTVDFEDFRPVSQRLKDESTIGDGLTHLNRHLAGRIWTDLAAGRSAILEFLGLHRLDNQNLMLSNGNTDFDSLRQTVQYLGTLPRETPWAEFREDMRRRGFEPGWGNTAGRVRETMRLLMDLLDSPSPAALESFLDRIPMISNVTIISIHGWFAQDKVLGRPDTGGQVVYILDQARALEREMRNRLRQQGVDVEPRILIVTRLIPESDGTTCDQRLEPVHGAENVQILRVPFRYEDGRIHPHWISRFKVWPYLERFARDAEREVKAELGSRPDLIIGNYSDGGLVATIMSEKLGVTQCNIAHALEKSKYPGSDLHWPLYEQDHHFACQFTADLIAMNAADIIVTSTYQEIAGNDREVGQYESHQDYTLPGLYRVENGIDVFDSKFNIVSPGADPSTYFSYARHEERFSSLWPEIESLLFGREPGPDIRGVLEDPQKPIILSVARMDRIKNLSGLAELYGRSARLRSLANLVIIGGHVDVQASMDAEEREEIRRMHEIMDRYQLDGQMRWVGSHLDKRVVGELYRVVADGRGVFVQPALFEAFGLTVIEAMSSGLPVFATRHGGPLEIIEDGVSGFHIDPNDPEAVAEKLADFLEAARERPKYWEEISQAALARVSERYTWERYAERLMTIARCFGFWRFVLSRESQVMERYLQMFRHLQWRPLAHAVPME

SEQ ID NO: 156 - protein, 793 aa, synthetic construct
MIEELRQQLLDSPRSWRAFLRHLVASQRDSWLHTDLQRACKTFREQPPEGYPEDIGWLADFVAHTQEAIFRDPWMVFAWRLRPGVWEYVRIHVEQLAVEELSTDEYLQAKEQLVGLGAEGEAVLTVDFEDFRPVSQRLKDESTIGDGLTHLNRHLAGRIWTDLAAGRSQILEFLGLHRLDNQNLMLSNGNTDFDSLRQTVQYLGTLPRETPWAEFREDMRRRGFEPGWGNTAGRVRETMRLLMDLLDSPSPAALESFLDRIPMISNVLIVSIHGWFAQDKVLGRPDTGGQVVYILDQARALEREMRNRLRQQGVDVEPRILIATRLIPESDGTTCDQRLEPVHGAENVQILRVPFRYEDGRIHPHWISRFKVWPYLERYASDLEREVKAELGSRPDLIIGNYSDGNLVATLLSEKLGVTQCNIAHALEKSKYLYSDLHWPDHEQDHHFACQFTADLIAMNAADIIVTSTYQEIAGNDREVGQYESHQDYTLPGLYRVENGIDVFDSKFNIVSPGADPRTYFSYARTEERFSSLWPEIESLLFGREPGPDIRGVLEDRQKPIILSMGRLDRIKNLSGLLELWGRSSRLRSLANLVIIGGHLDVQNSMDAEEREELRRLHEILDHYQLDGQVRIVGSQLDKTVVGELYRVVADGRGIFIQPALFEAFGLTVIEAMSSGLPVWATRHGGPLEIIEDGVSGFHIDPNDPEATVEKWADWIEAARERPKYWEEISDAALARVSERYTWERYAERLMTIARCFGFWRFVLSRESQVMERYLQMFRHLQWRPLAHAVPME

SEQ ID NO: 157 - protein, 793 aa, synthetic construct
MIEELRQQLLDSPRSWRAFLRHLVASQRDSWLHTDLQRACKTFREQPPEGYPEDIGWLADFVAHTQEAIFRDPWMVFAWRLRPGVWEYVRIHVEQLAVEELSTDEYLQAKEQLVGLGAEGEAVLTVDFEDFRPVSQRLKDESTIGDGLTHLNRHLAGRIWTDLAAGRSQILEFLGLHRLDNQNLMLSNGNTDFDSLRQTVQYLGTLPRETPWAEFREDMRRRGFEPGWGNTAGRVRETMRLLMDLLDSPSPAALESFLDRIPMISNVLIVSIHGWFAQDKVLGRPDTGGQVVYILDQARALEREMRNRLRQQGVDVEPRILIATRLIPESDGTTCDQRLEPVHGAENVQILRVPFRYEDGRIHPHWISRFKVWPYLERYASDLEREVKAELGSRPDLIIGNYSDGNLVATLLSEKLGVTQCNIAHALEKSKYLYSDLHWPDHEQDHHFACQFTADLIAMNAADIIVTSTYQEIAGNDREVGQYESHQDYTLPGLYRVENGIDVFDSKFNIVSPGADPRTYFSYARTEERFSSLWPEIESLLFGREPGPDIRGVLEDRQKPILLSMMRLDRIKNLSGLLELWGRSSRLRSLANLVLIGGHVDVQNSMDAEEREEIRRLHEILDHYQLDGQVRLVGSQLDKTVVGELYRVVADGRGWFIQPALFEAFGLTVIEAMSSGLPVVATRHGGPLEIIEDGVSGFHIDPNDPEATVEKWADIIEAARERPKYWEEISDAALARVSERYTWERYAERLMTIARCFGFWRFVLSRESQVMERYLQMFRHLQWRPLAHAVPME

SEQ ID NO: 158 - protein, 793 aa, synthetic construct
MIEELRQQLLDSPRSWRAFLRHLVASQRDSWLHTDLQRACKTFREQPPEGYPEDIGWLADFVAHTQEAIFRDPWMVFAWRLRPGVWEYVRIHVEQLAVEELSTDEYLQAKEQLVGLGAEGEAVLTVDFEDFRPVSQRLKDESTIGDGLTHLNRHLAGRIWTDLAAGRSQILEFLGLHRLDNQNLMLSNGNTDFDSLRQTVQYLGTLPRETPWAEFREDMRRRGFEPGWGNTAGRVRETMRLLMDLLDSPSPAALESFLDRIPMISNVLIVSIHGWFAQDKVLGRPDTGGQVVYILDQARALEREMRNRLRQQGVDVEPRILIATRLIPESDGTTCDQRLEPVHGAENVQILRVPFRYEDGRIHPHWISRFKVWPYLERYASDLEREVKAELGSRPDLIIGNYSDGNLVATLLSEKLGVTQCNIAHALEKSKYLYSDLHWPDHEQDHHFACQFTADLIAMNAADIIVTSTYQEIAGNDREVGQYESHQDYTLPGLYRVENGIDVFDSKFNIVSPGADPRTYFSYARTEERFSSLWPEIESLLFGREPGPDIRGVLEDRQKPIILSMGRLDRIKNLSGLLELWGRSSRLRSLANLVIIGGHIDVQNSMDAEEREEIRRLHEILDHYQLDGQIRLVGSQLDKTVVGELYRVVADGRGIFIQPALFEAFGLTVIEAMSSGLPVWATRHGGPLEIIEDGVSGFHIDPNDPEATVEKWADWWEAARERPKYWEEISDAALARVSERYTWERYAERLMTIARCFGFWRFVLSRESQVMERYLQMFRHLQWRPLAHAVPME

SEQ ID NO: 159 - protein, 793 aa, synthetic construct
MIEELRQQLLDSPRSWRAFLRHLVASQRDSWLHTDLQRACKTFREQPPEGYPEDIGWLADFVAHTQEAIFRDPWMVFAWRLRPGVWEYVRIHVEQLAVEELSTDEYLQAKEQLVGLGAEGEAVLTVDFEDFRPVSQRLKDESTIGDGLTHLNRHLAGRIWTDLAAGRSQILEFLGLHRLDNQNLMLSNGNTDFDSLRQTVQYLGTLPRETPWAEFREDMRRRGFEPGWGNTAGRVRETMRLLMDLLDSPSPAALESFLDRIPMISNVLIVSIHGWFAQDKVLGRPDTGGQVVYILDQARALEREMRNRLRQQGVDVEPRILIATRLIPESDGTTCDQRLEPVHGAENVQILRVPFRYEDGRIHPHWISRFKVWPYLERYASDLEREVKAELGSRPDLIIGNYSDGNLVATLLSEKLGVTQCNIAHALEKSKYLYSDLHWPDHEQDHHFACQFTADLIAMNAADIIVTSTYQEIAGNDREVGQYESHQDYTLPGLYRVENGIDVFDSKFNIVSPGADPRTYFSYARTEERFSSLWPEIESLLFGREPGPDIRGVLEDRQKPILLSMGRLDRIKNLSGLLELWGRSSRLRSLANLVIIGGHWDVQNSMDAEEREEIRRLHEILDHYQLDGQVRIVGSQLDKTVVGELYRVVADGRGWFIQPALFEAFGLTVIEAMSSGLPVIATRHGGPLEIIEDGVSGFHIDPNDPEATAEKIADIIEAARERPKYWEEISDAALARVSERYTWERYAERLMTIARCFGFWRFVLSRESQVMERYLQMFRHLQWRPLAHAVPME

SEQ ID NO: 160 - protein, 793 aa, synthetic construct
MIEELRQQLLDSPRSWRAFLRHLVASQRDSWLHTDLQRACKTFREQPPEGYPEDIGWLADFVAHTQEAIFRDPWMVFAWRLRPGVWEYVRIHVEQLAVEELSTDEYLQAKEQLVGLGAEGEAVLTVDFEDFRPVSQRLKDESTIGDGLTHLNRHLAGRIWTDLAAGRSQILEFLGLHRLDNQNLMLSNGNTDFDSLRQTVQYLGTLPRETPWAEFREDMRRRGFEPGWGNTAGRVRETMRLLMDLLDSPSPAALESFLDRIPMISNVLIVSIHGWFAQDKVLGRPDTGGQVVYILDQARALEREMRNRLRQQGVDVEPRILIATRLIPESDGTTCDQRLEPVHGAENVQILRVPFRYEDGRIHPHWISRFKVWPYLERYASDLEREVKAELGSRPDLIIGNYSDGNLVATLLSEKLGVTQCNIAHALEKSKYLYSDLHWPDHEQDHHFACQFTADLIAMNAADIIVTSTYQEIAGNDREVGQYESHQDYTLPGLYRVENGIDVFDSKFNIVSPGADPRTYFSYARTEERFSSLWPEIESLLFGREPGPDIRGVLEDRQKPIILSMSRLDRIKNQSGLMELVGRSSRLRSLANLVVIGGHVDVQNSMDAEEREEIRRIHEIIDHYQLDGQARWVGSQLDKTVVGELYRVVADGRGVFVQPALFEAFGLTVIEAMSSGLPVFATRHGGPLEIIEDGVSGFHIDPNDPEATAEKLADFFEAARERPKYWEEISDAALARVSERYTWERYAERLMTIARCFGFWRFVLSRESQVMERYLQMFRHLQWRPLAHAVPME

SEQ ID NO: 161 - protein, 793 aa, synthetic construct
MIEELRQQLLDSPRSWRAFLRHLVASQRDSWLHTDLQRACKTFREQPPEGYPEDIGWLADFVAHTQEAIFRDPWMVFAWRLRPGVWEYVRIHVEQLAVEELSTDEYLQAKEQLVGLGAEGEAVLTVDFEDFRPVSQRLKDESTIGDGLTHLNRHLAGRIWTDWAAGRSQLIEWLGLHRIDNQNLWLSNGNTDLDSIRQILQYLGTLPRETPWAEFREDLRRRGIEPGWGNTAGRVRETWRILMDLLDSPSPAAIESWLDRLPLISNVLIVSIHGWFAQDKVLGRPDTGGQVVYILDQARALEREMRNRLRQQGIDIEPRILIATRLIPESDGTTCDQRLEPVHGAENVQILRVPFRYEDGRIHPHWISRFKVWPYLERYASDLEREVKAELGSRPDLIIGNYSDGNLVATLLSEKLGVTQCNIAHALEKSKYLYSDLHWPDHEQDHHFACQFTADLIAMNAADIIVTSTYQEIAGNDREVGQYESHQDYTLPGLYRVENGIDVFDSKFNIVSPGADPRTYFSYARTEERFSSLWPEIESLLFGREPGPDIRGVLEDRQKPIILSMARMDRIKNLSGLAELYGRSSRLRSLANLVIIGGHVDVQNSMDAEEREEIRRMHEIMDHYQLDGQMRWVGSQLDKTVVGELYRVVADGRGVFVQPALFEAFGLTVIEAMSSGLPVFATRHGGPLEIIEDGVSGFHIDPNDPEATAEKLADFLEAARERPKYWEEISDAALARVSERYTWERYAERLMTIARVFGWWRFLLSRESQVMERYLQMFRHLQWRPLAHAVPME

SEQ ID NO: 162 - protein, 793 aa, synthetic construct
MIEELRQQLLDSPRSWRAFLRHLVASQRDSWLHTDLQRACKTFREQPPEGYPEDIGWLADFVAHTQEAIFRDPWMVFAWRLRPGVWEYVRIHVEQLAVEELSTDEYLQAKEQLVGLGAEGEAVLTVDFEDFRPVSQRLKDESTIGDGLTHLNRHTAGRMWTDQAAGRSQMLEFLGLHRIDNQNLMLSNGNTDVDSLRQLIQYLGTLPRETPWAEFREDARRRGFEPGWGNTAGRVRETLRLLLDLLDSPSPAALESFLDRIPMISNVLIVSIHGWFAQDKVLGRPDTGGQVVYILDQARALEREMRNRLRQQGVDVEPRILIATRLIPESDGTTCDQRLEPVHGAENVQILRVPFRYEDGRIHPHWISRFKVWPYLERYASDLEREVKAELGSRPDLIIGNYSDGNLVATLLSEKLGVTQCNIAHALEKSKYLYSDLHWPDHEQDHHFACQFTADLIAMNAADIIVTSTYQEIAGNDREVGQYESHQDYTLPGLYRVENGIDVFDSKFNIVSPGADPRTYFSYARTEERFSSLWPEIESLLFGREPGPDIRGVLEDRQKPIILSMARMDRIKNLSGLAELYGRSSRLRSLANLVIIGGHVDVQNSMDAEEREEIRRMHEIMDHYQLDGQMRWVGSQLDKTVVGELYRVVADGRGVFVQPALFEAFGLTVIEAMSSGLPVFATRHGGPLEIIEDGVSGFHIDPNDPEATAEKLADFLEAARERPKYWEEISDAALARVSERYTWERYAERLMTIARAFGFWRFMLSRESQVMERYLQMFRHLQWRPLAHAVPME

SEQ ID NO: 163 - protein, 793 aa, synthetic construct
MIEELRQQLLDSPRSWRAFLRHLVASQRDSWLHTDLQRACKTFREQPPEGYPEDIGWLADFVAHTQEAIFRDPWMVFAWRLRPGVWEYVRIHVEQLAVEELSTDEYLQAKEQLVGLGAEGEAVLTVDFEDFRPVSQRLKDESTIGDGLTHLNRHLAGRMWTDSAAGRSQLLEFNGLHRLDNQNLLYSNGNTDFDSIRQLMQYLGTLPRETPLAELREDMRRRGFEPGWGNTAGRVRETMRLLYDLLDSPSPAALESFLDRIPMISNVLIVSIHGWFAQDKVLGRPDTGGQVVYILDQARALEREMRNRLRQQGIDVEPRILIATRLIPESDGTTCDQRLEPVHGAENVQILRVPFRYEDGRIHPHWISRFKVWPYLERYASDLEREVKAELGSRPDLIIGNYSDGNLVATLLSEKLGVTQCNIAHALEKSKYLYSDLHWPDHEQDHHFACQFTADLIAMNAADIIVTSTYQEIAGNDREVGQYESHQDYTLPGLYRVENGIDVFDSKFNIVSPGADPRTYFSYARTEERFSSLWPEIESLLFGREPGPDIRGVLEDRQKPIILSMARMDRIKNLSGLAELYGRSSRLRSLANLVIIGGHVDVQNSMDAEEREEIRRMHEIMDHYQLDGQMRWVGSQLDKTVVGELYRVVADGRGVFVQPALFEAFGLTVIEAMSSGLPVFATRHGGPLEIIEDGVSGFHIDPNDPEATAEKLADFLEAARERPKYWEEISDAALARVSERYTWERYAERLMTIARAFGFWRFVLSRESQVMERYLQMFRHLQWRPLAHAVPME

SEQ ID NO: 164 - protein, 793 aa, synthetic construct
MIEELRQQLLDSPRSWRAFLRHLVASQRDSWLHTDLQRACKTFREQPPEGYPEDIGWLADFVAHTQEAIFRDPWMVFAWRLRPGVWEYVRIHVEQLAVEELSTDEYLQAKEQLVGLGAEGEAVLTVDFEDFRPVSQRLKDESTIGDGLTHLNRHLAGRIWTDLAAGRSQILEFLGLHRLDNQNLMLSNGNTDFDSLRQTVQYLGTLPRETPWAEFREDMRRRGFEPGWGNTAGRVRETMRLLMDLLDSPSPAALESFLDRIPMISNILIVSIHGWFAQDKVLGRPDTGGQVVWILDQARAIERELRNRLRQQGVDVEPRILIATRLIPESDGTTCDQRLEPVHGAENVQILRVPFRYEDGRIHPHWISRFKVWPYLERYASDLEREVKAELGSRPDVIIGNYSDGNLVATLLSEKLGVTQINFAHALEKSKYLYSDLHWPDHEQDHHFACQFTADLIAMNAADLIVTSTYQEIAGNDREVGQYESHQDYTLPGLYRVENGIDVFDSKFNIISPGADPRTYFSYARTEERFSSLWPEIESLLFGREPGPDIRGVLEDRQKPIILSMARMDRIKNLSGLAELYGRSSRLRSLANLVIIGGHVDVQNSMDAEEREEIRRMHEIMDHYQLDGQMRWVGSQLDKTVVGELYRVVADGRGVFVQPALFEAFGLTVIEAMSSGLPVFATRHGGPLEIIEDGVSGFHIDPNDPEATAEKLADFLEAARERPKYWEEISDAALARVSERYTWERWAERLLTLWRCWGFWRFVLSRESQVMERYLQMFRHLQWRPLAHAVPME

SEQ ID NO: 165 - protein, 793 aa, synthetic construct
MIEELRQQLLDSPRSWRAFLRHLVASQRDSWLHTDLQRACKTFREQPPEGYPEDIGWLADFVAHTQEAIFRDPWMVFAWRLRPGVWEYVRIHVEQLAVEELSTDEYLQAKEQLVGLGAEGEAVLTVDFEDFRPVSQRLKDESTIGDGLTHLNRHLAGRIWTDLAAGRSQILEFLGLHRLDNQNLMLSNGNTDFDSLRQTVQYLGTLPRETPWAEFREDMRRRGFEPGWGNTAGRVRETMRLLMDLLDSPSPAALESFLDRIPMISNVLIISVHGWFAQDKVLGRPDTGGQVVYILDQARALEREMRNRLRQQGVDVEPRIIIITRLIPESDGTTCDQRLEPVHGAENVQILRIPFRYEDGRIHPHWISRFKVWPYLERWVSDLEREIKAELGSRPDLIIGNYSDGNLIATLLSEKWGVTQCNIAHALEKSKYLYSDLHWPDHEQDHHFACQFTADLIAMNAADIIVTSTYQEIAGNDREVGQYESHQDYTLPGLYRVENGIDVFDSKFNIVSPGADPRTYFSYARTEERFSSLWPEIESLLFGREPGPDIRGVLEDRQKPIILSMARMDRIKNLSGLAELYGRSSRLRSLANLVIIGGHVDVQNSMDAEEREEIRRMHEIMDHYQLDGQMRWVGSQLDKTVVGELYRVVADGRGVFVQPALFEAFGLTVIEAMSSGLPVFATRHGGPLEIIEDGVSGFHIDPNDPEATAEKLADFLEAARERPKYWEEISDAALARVSERYTWERYAERLMTIARCFGFWRFVLSRESQVMERYLQMFRHLQWRPLAHAVPME

SEQ ID NO: 166 - protein, 793 aa, synthetic construct
MIEELRQQLLDSPRSWRAFLRHLVASQRDSWLHTDLQRACKTFREQPPEGYPEDIGWLADFVAHTQEAIFRDPWMVFAWRLRPGVWEYVRIHVEQLAVEELSTDEYLQAKEQLVGLGAEGEAVLTVDFEDFRPVSQRLKDESTIGDGLTHLNRHLAGRIWTDLAAGRSQILEFLGLHRLDNQNLMLSNGNTDFDSLRQTVQYLGTLPRETPWAEFREDMRRRGFEPGWGNTAGRVRETMRLLMDLLDSPSPAALESFLDRIPMISNVLILSIHGWFAQDKVLGRPDTGGQVVYILDQARALEREMRNRLRQQGVDVEPRILIVTRLIPESDGTTCDQRLEPVHGAENVQILRIPFRYEDGRIHPHWISRFKVWPYLERWVSDVEREIKAELGSRPDLIIGNYSDGNLVATLLSEKWGITQCNIAHALEKSKYLYSDLHWPDHEQDHHFACQFTADLIAMNAADIIVTSTYQEIAGNDREVGQYESHQDYTLPGLYRVENGIDVFDSKFNIVSPGADPRTYFSYARTEERFSSLWPEIESLLFGREPGPDIRGVLEDRQKPIILSMARMDRIKNLSGLAELYGRSSRLRSLANLVIIGGHVDVQNSMDAEEREEIRRMHEIMDHYQLDGQMRWVGSQLDKTVVGELYRVVADGRGVFVQPALFEAFGLTVIEAMSSGLPVFATRHGGPLEIIEDGVSGFHIDPNDPEATAEKLADFLEAARERPKYWEEISDAALARVSERYTWERYAERLMTIARCFGFWRFVLSRESQVMERYLQMFRHLQWRPLAHAVPME

SEQ ID NO: 167 - protein, 793 aa, synthetic construct
MIEELRQQLLDSPRSWRAFLRHLVASQRDSWLHTDLQRACKTFREQPPEGYPEDIGWLADFVAHTQEAIFRDPWMVFAWRLRPGVWEYVRIHVEQLAVEELSTDEYLQAKEQLVGLGAEGEAVWTIDLEDYRPVSQRLKDESTIGDGLTHLNRHLAGRIWTDLAAGRSQILEFLGLHRLDNQNLMLSNGNTDFDSLRQTVQYLGTLPRETPWAEFREDMRRRGFEPGWGNTAGRVRETMRLLMDLLDSPSPAALESFLDRIPMISNVLIVSIHGWFAQDKVLGRPDTGGQVVYILDQARALEREMRNRLRQQGVDVEPRILIATRLIPESDGTTCDQRLEPVHGAENVQILRVPFRYEDGRIHPHWISRFKVWPYLERYASDLEREVKAELGSRPDLIIGNYSDGNLVATLLSEKLGVTQCNIAHALEKSKYLYSDLHWPDHEQDHHFACQFTADWIAMNAADIIVTSTYQEIAGNDREVGQYESHQDYTLPGLYRVENGVDVFDSKFNIVSPGADPRTYFSYARTEERFSSLWPEIESLLFGREPGPDIRGVLEDRQKPIILSMARMDRIKNLSGLAELYGRSSRLRSLANLVIIGGHVDVQNSMDAEEREEIRRMHEIMDHYQLDGQMRWVGSQLDKTVVGELYRVVADGRGVFVQPALFEAFGLTVIEAMSSGLPVFATRHGGPLEIIEDGVSGFHIDPNDPEATAEKLADFLEAARERPKYWEEISDAALARVSERYTWERYAERLMTIARCFGFWRFVLSRESQVMERYLQMIRHLQWRPLAHAVPME

SEQ ID NO: 168 - protein, 793 aa, synthetic construct
MIEVLRQQLLDNPNSWRAFLRHLVASGRDLWLHHDLQDACETFREQPPEGYPEDIGWFADFIAHCQEAIFRDPWMVFAWRLRPGRWEYVRIHVEQLAVEELSTDEYLQFKEELVGGNHEGEAVLTVDFEDFRPSSQRLKDESTIGNGLQHLNRHLAGRIWTDLAAGDSKILEFLGLHRLDGQQLMLSDRITDFDSLRQTVQYLGTLPEETPWAEFREDMRRLGFEPGWGDTAGRVRETMRLLMDLLDSPSPAALEKFLGRIPMISNVLIVSIHGWFAQDNVLGRPDTGGQVVYILDQARALEREMRERLRQQGVDVEPRILIATRLIPESDGTTCDQRLEPVHGTENVWILRVPFRYEDGRIHPHWISRFKVWPYLERYARDLEREVLAELGGRPDLIIGNYSDGNLVATILSEKLGVTQCNIAHALEKSKYPGSDLYWPDYEQKYHFACQFTADLIAMNAADIIVTSTYQEIAGNDREVGQYESHQDYTLPGLYRVVNGIDVFDPKFNIVSPGADPSIYFSYTRTEERFSSLHPEIEKLLFGREPGPDIRGVLEDPDKPIILSVARMDRIKNLTGLAELYGRSARLRELANLVIIGGHVDVQKSTDAEEREEIRRMHEIMDRYQLDGQMRWVGSHLDKRRVGELYRYVADGRGVFVQPALFEAFGLTVIEAMSSGLPVFATRHGGPLEIIEDGVSGFHIDPNDPDAVAEKLADFLEHAKEDPKYWEKISQAALQRVEERYTWERYAERLMTIARCYGFWRFVLSRESQVMRRYLQMFRHLQWRPLAHAVPME

SEQ ID NO: 169 - protein, 793 aa, synthetic construct
MIEVLRQQLLDNPNSWRAFLRHLVASGRDLWLHHDLQDACETFREQPPEGYPEDIGAFADFIAHCQEAIFRDPWMVFAWRLRPGRWEYVRIHVEQLAVEELSVDEYLQFKEELVGGNAEGEAVLTVDFEDFRPSSQRLKDESTIGNGLQHLNRHLAGRIWTDLAAGDSKLLEFLGLHRLDGQQLMLSDRITDFDSLRQAVQYLGTLPEDTPWSEFQHEMQRLGFEPGWGDTAGRVRETMRLLMDLLDSPSPAALEKFLGRIPMISNVLIVSPHGWFAQDNVLGRPDTGGQVVYILDQARALEREMRKRLREQGVDVEPRILIATRLIPESDGTTCDQRLEPVSGTENVWILRVPFRYEDGRIHPHWISRFKVWPYLERFARDLEREVLAELGGRPDLIIGNYSDGNLVATILSEKLGVTQCNIAHALEKSKYPGSDLYWRKYEEKYHFSCQFTADLIAMNAADIIVTSTYQEIAGNDHEVGQYESHQDYTLPGLYRVVNGIDVFDPKFNIVSPGADPSIYFSYSRTEERFSSLHPEIERLLFGREPGPDIRGVLEDPDKPIILSVARMDRIKNLTGLAELYGRSSRLRELANLVIIGGHVDVNKSSDREEREEIRRMHEIMDRYQLDGQMRWVGSHLDKRRVGELYRYVADTRGVFVQPALFEAFGLTVIEAMSSGLPVFATRHGGPLEIIEDGVSGFHIDPNDPDAVAEKLADFLEHAKEDPKYWEKISQAALQRVEERYTWERYAERLMTIARCYGFWRFVSKRERQVMRRYLQMFRHLQWRPLAHAVPME

SEQ ID NO: 170 - protein, 793 aa, synthetic construct
MIEVLRQQLSDHPNDWHAFLRHLVASQRDIWLHTDLQDACKTFREQPPEGYPEGIGALADFIAHCQEAIFRDPWMVFAWRLRPGVWEYVRIHVEQLAVEELSTDEYLQFKEQLVGGGAEGEAVLEVDFEDFRPGFQRLKDESTIGNGLTHLNRHLAGRLWTDLAGGRSRLLEFLGVHRLDGQNLMLSNRNTDFDSLRQVVQYLGTLPRETPWAEFREDMRRMGFEPGWGDTAGRVRETMRLLMDLLDSPSPAALEKFLARIPMISNVLIVSIHGWFAQDNVLGRPDTGGQVVYILDQARALEREMRNRLRQQGVDVEPRILIATRLIPDSDGTTCDQRLEPVHGAENVWILRVPFRYEDGRIHPHWISRFKVWPYLERYARDLEREVKAELGSRPDLIIGNYSDGNLVATILSEKLGVTQCNIAHALEKSKYPHSDLHWPKYEQDYHFACQFTADLIAMNAADIIVTSTYQEIAGNDREVGQYESHQAFTLPGLYRVVNGIDVFDPKFNIVSPGADPSIYFSYSRKEERLSSLHPEIESLLFGREPGPDIRGVLEDPQKPIILSVARMDRIKNLTGLAEWYGRNPRLRELANLVIIGGHVDVQKSSDAEEREEIRRMHEIMDRYQLDGQMRWIGSHLDKRVVGELYRVVADGRGVFVQPALFEAFGLTVIEAMTSGLPVFATRHGGPLEIIEHGVSGFHIDPNDPDAVAEKLADFLEAAREDPKYWEEISQAALARVSERYTWERYAERLMTIARCYGFWRFVSSRESQVTERYLQMFRHLQWRPLAHAVPME

SEQ ID NO: 171 - protein, 793 aa, synthetic construct
MIEVLRQQLLSHPNSWRAFLRHLVASQRGIWLHTDLQDACKTFREQPPEGYPEDIGWLADFIKHCQEAIFRDPWMVFAWRLRPGVWEYVRIHVEQLAVEELSTDEYLQFKEQLVGLGAEGEAVLTVDFEDFRPGFQRLKDESTIGDGLTHLNRHLAGRIWTDLGAGRSAILEFLGLHRLDGQQLMLSDRNTDFDSLRQTLQYLGTLPRETPWAEFREDMRRRGFEPGWGDTAGRVRETMRLLMDLLDSPSPAALEKFLDRIPMISNVLIVSIHGWFAQDKVLGYPDTGGQVVYILDQARALEREMRNRLRQQGVDVEPRILIATRLIPESDGTTCDQRLEPVHGAENVWILRVPFRYEDGRIHPHWISRFKVWPYLERYARDLEREVLAELGGRPDLIIGNYSDGNLVATILSEKLGVTQCNIAHALEKSKYPGSDLYWPKYEQDYHFACQFTADLIAMNAADIIVTSTYQEIAGNDREVGQYESHQDYTLPGLYRVINGIDVFDPRFNIVSPGADPSTYFSYARHERRFSSLHPEIESLLFGREPGPDIRGVLKDPDKPIILSVARMDRIKNLSGLAEWYGRSPRLRELANLVIIGGHVDVQKSSDGEEREEIRRMHEIMDRYQLDGQMRWVGSHLDKRVVGELYRVVADKRGVFVQPALFEAFGLTVIEAMSSGLPVFATRHGGPLEIIEHGVSGFHIDPNDPDAVAEKLADFLEAARERPKYWEKISQAALARVEERYTWERYAERLMTIARCFGFWRFVLSRERQVTRRYLQMFRHLQWRPLAHAVPME

SEQ ID NO: 172 - protein, 793 aa, synthetic construct
MIEVLRQQLQDHPRSWRAFLRHLVASGRGLWLHHDLQDACETFREQPPEGYPEDIGWLADFIQHCQEAIFRDPWMYFAWRLRPGVWEYVRIHVEQLTVEELSVSEYLQFKEQLVDGESEGNAVLTVDFEDFRPTSQRLKDESTIGNGLTHLNRHLAGRMWQDLGKGRSAILEFLGLHRLDGQHLMLSDGNRDFDSLRQAVQYLGKLPEDTPWSEFEEDLRRMGFEPGWGDTAGRVRETMRLLMDLLDSPSPAALEKFLGRIPMISNVLIVSIHGWFAQDNVLGRPDTGGQVVYILDQARALEREMRQRLREQGVDVEPRILIATRLIPESKGTTCDQRLEPVSGAENVWILRVPFRYEDGRIHPHWISRFKVWPYLERFAEDLEREVKAELGGRPDLIIGNYSDGGLVATLLSEKLGVTQCNIAHALEKTKYPGSDLYWKKYEQKYHFACQFTADLIAMNAADIIITSTYQEIAGNDREVGQYESHQAYTMPGLYRVVNGIDVFDSKFNIVSPGADPSIYFPYSRTEERFTSLHPEIEKLLFGREPGPPHRGVLEDPDKPIILSVARMDRIKNLTGLAELYGRSARLRELANLVIIGGHVDVEKSMDGEEREEIRRMHEIMDKYNLDGQMRWVGSHLNKVRVGELYRVVADRRGVFVQPALFEAFGLTVIEAMSSGLPVFATRHGGPAEIIEDGVSGFHIDPNDPEQVAEKLADFLEAAREDPTYWEKISQAALQRVEERYTWERYAERLMTIARCFGFWKFVSSRERQVMRRYLQMFRHLQWRPLAHAVPME

SEQ ID NO: 173 - protein, 793 aa, synthetic construct
MIEVLRQQLLDSPRSWRAFLRHLVASQRDSWLHTDLQHACKTFREQPPEGYPEDIGWLADFIAHCQEAIFRDPWIVFAWRLRPGVWEYVRIHVEQLAVEELSTDEYLQAKEQLVGLGAEGEAVLTVDFEDFRPVSQRLKDESTIGDGLTHLNRHLAGRIWTDLAAGRSAILEFLGLHRLDNQNLMLSNGNTDFDSLRQTVQYLGTLPRETPWAEFREDMRRRGFEPGWGNTAGRVRETMRLLMDLLDSPSPAALESFLDRIPMISNVLIVSPHGWFAQDKVLGRPDTGGQVVYILDQARALEREMRNRLRQQGVDVEPRILIATRLIPESDGTTCDQRLEPVHGAENVQILRVPFRYEDGRIHPHWISRFKVWPYLERYARDLEREVKAELGSRPDLIIGNYSDGGLVATILSEKLGVTQCNIAHALEKSKYPGSDLHWPLYEQDHHFACQFTADLIAMNAADFIVTSTYQEIAGNDREVGQYESHQDYTLPGLYRVENGIDVFDSKFNIVSPGADPSTYFSYARHEERFSSLWPEIESLLFGREPGPDIRGVLEDPQKPIIFSVARMDRIKNLSGLAELYGRSARLRSLANLVIIGGHVDVQASMDAEEREEIRRMHEIMDRYQLDGQMRWVGSHLDKRVVGELYRVVADGRGVFVQPALFEAFGLTVIEAMSSGLPVFATRHGGPLEIIEDGVSGFHIDPNDPEAVAEKLADFLEAARERPKYWEEISQAALARVSERYTWERYAERLMTLARIYGFWRFVLSRESQVMERYLQMFRHLQWRPLAHAVPME

SEQ ID NO: 174 - protein, 793 aa, synthetic construct
MIEVLRQQLLDSPRSWRAFLRHLVASQRDSWLHTDLQHACKTFREQPPEGYPEDIGWLADFIAHCQEAIFRDPWIVFAWRLRPGVWEYVRIHVEQLAVEELSTDEYLQAKEQLVGLGAEGEAVLTVDFEDFRPVSQRLKDESTIGDGLTHLNRHLAGRIWTDLAAGRSAILEFLGLHRLDNQNLMLSNGNTDFDSLRQTVQYLGTLPRETPWAEFREDMRRRGFEPGWGNTAGRVRETMRLLMDLLDSPSPAALESFLDRIPMISNVLILSPHGWFAQDKVLGRPDTGGQVVYILDQARALEREMRNRLRQQGVDVEPRILIVTRLIPESDGTTCDQRLEPVHGAENVQILRVPFRYEDGRIHPHWISRFKIWPYLERYARDVEREVKAELGSRPDLIIGNYSDGGLVASILSEKLGVTQCNIAHALEKSKYPGSDLHWPLYEQDHHFACQFTADLIAMNAADFIITSTYQEIAGNDREVGQYESHQDYTLPGLYRVENGIDVFDSKFNIVSPGADPSTYFSYARHEERFSSLWPEIESLLFGREPGPDIRGVLEDPQKPILFSVARMDRIKNLSGLAELYGRSARLRSLANLVIIGGHVDVQASMDAEEREEIRRMHEIMDRYQLDGQMRWVGSHLDKRVVGELYRVVADGRGVFVQPALFEAFGLTVIEAMSSGLPVFATRHGGPLEIIEDGVSGFHIDPNDPEAVAEKLADFLEAARERPKYWEEISQAALARVSERYTWERYAERLMTLARIYGFWRFVLSRESQVMERYLQMFRHLQWRPLAHAVPME

SEQ ID NO: 175 - protein, 793 aa, synthetic construct
MIEVLRQQLLDSPRSWRAFLRHLVASQRDSWLHTDLQHACKTFREQPPEGYPEDIGWLADFIAHCQEAIFRDPWIVFAWRLRPGVWEYVRIHVEQLAVEELSTDEYLQAKEQLVGLGAEGEAVLTVDFEDFRPVSQRLKDESTIGDGLTHLNRHLAGRIWTDLAAGRSAILEFLGLHRLDNQNLMLSNGNTDFDSLRQTVQYLGTLPRETPWAEFREDMRRRGFEPGWGNTAGRVRETMRLLMDLLDSPSPAALESFLDRIPMISNVLIVSPHGWFAQDKVLGRPDTGGQVVYILDQARALEREMRNRLRQQGVDVEPRILIVTRLIPESDGTTCDQRLEPVHGAENVQILRVPFRYEDGRIHPHWISRFKVWPYLERYARDLEREVKAELGSRPDLIIGNYSDGGLVATILSEKLGVTQCNIAHALEKSKYPGSDLHWPLYEQDHHFSCQFTADLIAMNAADFIVTSTYQEIAGNDREVGQYESHQDYTLPGLYRVENGIDVFDSKFNIVSPGADPSTYFSYARHEERFSSLWPEIESLLFGREPGPDIRGVLEDPQKPILFSVARMDRIKNLSGLAELYGRSARLRSLANLVVIGGHVDVQASMDAEEREEIRRMHEIMDRYQLDGQVRWIGSHLDKRVVGELYRVVADGRGVFVQPALFEAFGLTVIEAMSSGLPVFATRHGGPLEIIEDGVSGFHIDPNDPEAVAEKLADFLEAARERPKYWEEISQAALARVSERYTWERYAERLMTLARIYGFWRFVLSRESQVMERYLQMFRHLQWRPLAHAVPME

SEQ ID NO: 176 - protein, 793 aa, synthetic construct
MIEVLRQQLLDSPRSWRAFLRHLVASQRDSWLHTDLQHACKTFREQPPEGYPEDIGWLADFIAHCQEAIFRDPWVVFAWRLRPGVWEYVRIHVEQLAVEELSTDEYLQAKEQLVGLGAEGEAVLTVDFEDFRPVSQRLKDESTIGDGLTHLNRHLAGRIWTDLAAGRSAILEFLGLHRLDNQNLMLSNGNTDFDSLRQTVQYLGTLPRETPWAEFREDMRRRGFEPGWGNTAGRVRETMRLLMDLLDSPSPAALESFLDRIPMISNILIVSIHGWFAQDKVLGRPDTGGQVVYILDQVRALEREMRNRLRQQGVDVEPRILIVTRLIPESDGTTCDQRLEPVHGAENVQILRVPFRYEDGRIHPHWISRFKVWPYLERFARDAEREVKAELGSRPDLIIGNYSDGNLVASILSEKLGVTQCNIAHALEKSKYPGSDLHWPLYEQDHHFACQFTADLIAMNAADFIITSTYQEIAGNDREVGQYESHQDYTLPGLYRVENGIDVFDSKFNIVSPGADPSTYFSYARHEERFSSLWPEIESLLFGREPGPDIRGVLEDPQKPIIFSVARLDRIKNLSGLAELFGRSARLRSLANLVIIGGHVDVQASMDAEEREEIRRMHEIMDRYQLDGQMRWLGSHLDKRVVGELYRVVADGRGVFVQPALFEAFGLTVIEAMSSGLPVFATRHGGPLEIIEDGVSGFHIDPNDPEAVAEKLADFLEAARERPKYWEEISQAALARVSERYTWERYAERLMTLARIYGFWRFVLSRESQVMERYLQMFRHLQWRPLAHAVPME

SEQ ID NO: 177 - protein, 793 aa, synthetic construct
MIEVLRQQLLDSPRSWRAFLRHLVASQRDSWLHTDLQHACKTFREQPPEGYPEDIGWLADFIAHCQEAIFRDPWIYFAWRLRPGVWEYVRIHVEQLAVEELSTDEYLQAKEQLVGLGAEGEAVLTVDFEDFRPVSQRLKDESTIGDGLTHLNRHLAGRIWTDLAAGRSAILEFLGLHRLDNQNLMLSNGNTDFDSLRQTVQYLGTLPRETPWAEFREDMRRRGFEPGWGNTAGRVRETMRLLMDLLDSPSPAALESFLDRIPMISNVLIVSPHGWFAQDKVLGRPDTGGQVVYILDQARALEREMRNRLRQQGVDVEPRILIATRLIPESDGTTCDQRLEPVHGAENVQILRVPFRYEDGRIHPHWISRFKIWPYLERYARDLEREVKAELGSRPDLIIGNYSDGNLVATILSEKLGVTQCNIAHALEKSKYPGSDLHWPLYEQDHHFSCQFTADLIAMNAADFIVTSTYQEIAGNDREVGQYESYQDYTLPGLYRVENGIDVFDSKFNIVSPGADPSTYFSYARHEERFSSLWPEIESLLFGREPGPDIRGVLEDPQKPILFSVARMDRIKNLSGLAELYGRSARLRSLANLVIIGGHVDVQASMDAEEREEIRRMHELMDRYQLDGQMRWIGSHLDKRVVGELYRVVADGRGVFVQPALFEAFGLTVIEAMSSGLPTFATRHGGPLEIIEDGVSGFHIDPNDPEAVAEKLADFLEAARERPKYWEEISQAALARVSERYTWERYAERLMTLARIYGFWRFVLSRESQVMERYLQMFRHLQWRPLAHAVPME

SEQ ID NO: 178 - protein, 793 aa, synthetic construct
MRERLEDTLSAHRNELLSLLSRYVAQGKGILQPHHLLDELEAVIEEDEEKSKLKDGPFGEVLKSTQEAIVLPPWVALAVRPRPGVWEYVRVNVDELSVEELSVSEYLRFKEELVDGSSEGNAVLEVDFEDFNASFQRPKDESTIGNGVQHLNRHLSGRLWRDLESGMEPLLDFLRAHNYKGHNLMLNDRIQSFDRLRKAEQYLGKLPPDTPYSEFEHKFQELGLERGWGDTAERVLEMIRLLMDILDSPSPSTLEKFLGRIPMVFNVVILSPHGYFGQANVLGLPDTGGQVVYILDQVRALENEMLLRIKQQGLDITPRILIVTRLIPDAKGTTCGQRLEKVSGTEHSHILRVPFRTEKGIVRPKWISRFDVWPYLERFAEDAASEIAAELQGKPDLIIGNYSDGNLVASLLAHKLGVTQCTIAHALEKTKYPDSDIYWKKFEEKYHFSCQFTADLIAMNHADFIITSTYQEIAGSDDTVGQYESHTAFTLPGLYRVVHGIDVFDPKFNIVSPGADMSIYFPYTEKEKRLTSLHPSIEELLYSPEQNDEHIGVLKDRSKPIIFSVARLDRVKNITGLVEWYGKNTKLRELVNLVVVAGDIDVKKSKDREEIAEIKKMHDLIKTYNLNGQFRWISSHMNKVRVGELYRYIADTKGAFVQPAFYEAFGLTVVEAMTCGLPTFATCHGGPAEIIEHGVSGFHIDPYHGDKAAELLADFFEKCKADPSHWDKISQGGLQRIYEKYTWKIYSERLMTLAGVYGFWKYVSKRERQVTRRYLQMFRHLQYRPLAHSVPLE

SEQ ID NO: 179 - protein, 793 aa, synthetic construct
MRERLDDTLSAHRNELVSLLSRYVAQGKGILQPHQLLDELEAVIEEDGELEKLKDGPFGEVLRSTQEAIVLPPWVALAVRPRPGVWEYVRVNVYELSVEELTVSEYLKFKEELVDGRSEGNAVLEVDFEDFNASFQRPKDESTIGNGVQHLNRHLSGRLWRDLESGMEPLLDFLRAHKYKGHTMMLNDRIQSFDSLRKAEQYLGKLPPDTPYSEFEHKLQELGLERGWGDTAERVLEMIRLLMDLLDSPSPSTLEKFLGRIPMVFNVVILSPHGYFAQANVLGLPDTGGQVVYILDQVRALENEMLLRIKQQGLDITPRILIVTRLIPDAKGTTCNQRLEKVSGTEHSHILRVPFRTEKGILRPKWISRFDVWPYLERFAEDVASEISAELQGKPDLIIGNYSDGNLVASLLAHKLGVTQCTIAHALEKTKYPDSDIYWKKFEEKYHFSCQFTADLIAMNHADFIITSTYQEIAGSDDTVGQYESHTAFTLPGLYRVVHGIDVFDPKFNIVSPGADMSIYFPYTEKEKRLTSLHPEIEELLYSPEQNDEHIGVLKDRSKPIIFSVARLDRVKNITGLVEWYGKNAKLRELVNLVVVAGYIDVKKSKDREEQAEIEKMHELIKKYKLNGQFRWISSHMNKVRVGELYRYIADTKGAFVQPAFYEAFGLTVVEAMTCGLPTFATCHGGPAEIIEDGVSGFHIDPYHGDQAAELLVDFFEKCKKDPSYWEKISQGGLKRIYEKYTWKIYSERLMTLAGVYGFWKYVSKRERQVTRRYLQMFRHLQYRPLAHSVPLE

SEQ ID NO: 180 - protein, 793 aa, synthetic construct
MRERVEDTLSAHRNELVSLLSRYVAQGKGILQPHQLLDELEAVIEEDEARQKLRDGPFGEVLRSAQEAIVLPPWVALAVRPRPGVWEYVRVNVDELSVEQLSVSEYLRFKEELVDGSAEGNAVLEVDFEDFNASFQRPKDESTIGNGVQHLNRHLSGRLWRDLESGMQPLLDFLRAHKYKGHNLMLNDRIQSFDRLRKAEQYLGKLPPDTPYSEFEHKLQELGLEKGWGDTAERVLEMIRLLMDLLDSPSPSTLEKFLGRIPMVFNVVILSPHGYFGQANVLGLPDTGGQVVYILDQVRALENEMLLRIKQQGLDITPRILIVTRLIPDAKGTTCGQRLEKVSGTEHSHILRVPFRTEKGIVRPKWISRFDVWPYLERFAEDAASEIAAELQGKPDLIIGNYSDGNLVASLLAHKLGVTQCTIAHALEKTKYPDSDIYWKKFEEKYHFSCQFTADLIAMNHADFIITSTYQEIAGSDDTVGQYESHTAFTLPGLYRVVHGIDVFDPKFNIVSPGADMSIYFPYTEKEKRLTSLHPEIEELLYSPEQNDEHIGVLKDRSKPIIFSVARLDRVKNITGLVEWYGKNARLRELVNLVVVAGDIDPKKSKDREEIAEIEKMHELIEKYNLNGQFRWISSHMNKARVGELYRYIADTKGAFVQPAFYEAFGLTVVEAMTCGLPTFATCHGGPAEIIVHGVSGFHIDPYHGDKAAELLVDFFEKCKEDPSHWDKISQGGLQRIYEKYTWKIYSERLMTLAGVYGFWKYVSKRERQVTRRYLQMFRHLQFRPLAHTVPLE

SEQ ID NO: 181 - protein, 793 aa, synthetic construct
MRERVEDTLSAHRNELVSLLSRYVAKGKGILQPHQLLDELEAVIEEDDEKEKLKDGPFGEVLRSAQEAIVVPPWVALAVRPRPGVWEYVRVNVEELSVEQLTVSEYLRFKEELVDGSSEGNAVLEVDFEDFNASFQRPKDESTIGNGVQHLNRHLSGRLWRDLESGLEPLLDFLRAHNYKGHTMMLNDRIQSFDRLRKAEQYLGKLPPDTPYSEFEHKLQELGLERGWGDTAERVLEMIRLLMDLLDSPSPSTLEKFLGRIPMVFNVVILSPHGYFGQANVLGYPDTGGQVVYILDQVRALENEMLLRIKQQGLDITPRILIVTRLIPDAKGTTCNQRLEKVSGTEHSHILRVPFRTEKGIVRPKWISRFDVWPYLERFAEDVANEIAAELQGKPDLIIGNYSDGNLVASLLAHKLGVTQCTIAHALEKTKYPDSDIYWKKFEEKYHFSCQFTADLIAMNHADFIITSTYQEIAGSDDTVGQYESHTAFTLPGLYRVVHGIDVFDPKFNIVSPGADMSIYFPYTEKEKRLTALHPEIEELLYSPEQNDEHIGVLKDRSKPIIFSVARLDRVKNITGLVEWYGKNKRLRELVNLVVVAGYIDVKKSKDREEQAEIKKMHGLIKTYNLNGQFRWISAHTNKVRVGELYRYIADTRGAFVQPALYEAFGLTVVEAMTCGLPTFATCHGGPAEIIVHGVSGFHIDPYHGDQAAELLVDFFEKCKEDPSYWDKISQGGLQRIYEKYTWKIYSERLMTLAGVYGFWKYVSKRERQVTRRYLQMFRHLQFRPLAHSVPLE

SEQ ID NO: 182 - protein, 793 aa, synthetic construct
MIEELREFLAEHRDAVYLLLRRYLGLGRPFLLRSDLWDEFEAFCEEQGEEEGLLDSPLARLIAAAQEAVLDAPWIYLAVRPRVARWEYLRIHLETLEVEEISVSEFLAFKERLVNGDPEGEAVLEVDLGDFNREFQKLKDESTIGRGVEHLNRHLSGRLWQDLGKGDQRLLDFLRVHQYRGQQLMLNDRIRDFDALRRALQYLGRQPPEAPWEEVAHELQELGFEPGWGRTAARMRDTLRLLMDILDSPSPETLERFLGRIPMIFSIAILSPHGYFGQANVLGLPDTGGQVVYILDQVRALEREMRRRLAEQGLDIEPQILVVTRLIPEAGGTTCDQRLEPIVGTENARILRVPFRNEDGEVVPHWISRFEVWPYLERFALDVERELLAELGGRPDLIIGNYSDGNLVATLLSQKLGVTQCNIAHALEKTKYLYSDLYWRDNEEQYHFSCQFTADLIAMNAADFIITSTYQEIAGTDDSVGQYESYSAFTMPGLYRVVNGIDVFDPKFNIVSPGADAEVYFPYTETERRLTGLHPEIEELVFGGEERPDARGVLADPDKPLLFTVARLDRIKNITGLVEWYGRSERLRELANLLVIAGHVDPAQSDDREEREQIARMHELMDRHGLDGQVRWLGVHLDKNLVGELYRYVADRRGAFVQPALFEAFGLTVIEAMSSGLPTFATCYGGPLEIIEHGVSGFHIDPNHGEEAAELIADFFERCAADPGYWERISQGALERVRSRYTWELYAERMMTLSRIYGFWKYVTNRERQVTRRYLQMFRHLQFRPLAHAVPLE

SEQ ID NO: 183 - protein, 793 aa, synthetic construct
MIEELREFLAEHRDALYLLLRRYLALGRPFLLRSDLWDEFERFCEEDGEETELADSPLGRIIAATQEAAIDAPWIYLAVRPRVARWEYLRIHLETLEVEEISVSEFLAFKERLVNGAPEGDAVLEVDLGDFNREFQKLKDESTIGRGVEHLNRHLSGRLWQDLGKGDQRLLEFLRVHQYRGQQLMLNDRIRDFDGLRRALQYLGRQPPDAPWEEVAHELQRLGFEPGWGRTAARMRETLRLLMDILDSPSPETLERFLGRIPMIFSIAILSPHGYFGQANVLGRPDTGGQVVYILDQVRALEREMRRRLAEQGLDIEPQILVVTRLIPEAGGTTCDQRLEPIAGTENARILRVPFRNEDGEVVPQWISRFEVWPYLERFALDVERELLAELGGRPDLIIGNYSDGNLVATLLAQKLGVTQCNIAHALEKTKYLYSDLYWRDNEEQYHFSCQFTADLIAMNAADFIITSTYQEIAGTDDSVGQYESYSAFTLPGLYRVVNGIDVFDPKFNIVSPGADAEVYFPYTEQERRLTGLHPEIEELLFGDEPRPDARGVLEDRDKPLLFTVARLDRIKNITGLVEWYGRSPRLRELANLLVVAGHVDPARSSDREEREQIERMHELMDEHGLDGQVRWLGLHLDKNLVGELYRYVADRRGAFVQPALFEAFGLTVIEAMSSGLPTFATCYGGPLEIIEHGVSGFHIDPNHGEEAAEIMADFFERCAAEPGYWERISRGALARVESRYTWKLYAERMMTLSRIYGFWKYVTNRERQVTRRYLQMFRHLQFRPLAHAVPLE

SEQ ID NO: 184 - protein, 793 aa, synthetic construct
MIERLDEFLAEHRDQVYLLLRRYVGLGRPFLLRSDLWDEFLAFCEEDDEEEELLDSPLARAIRAAQEAVVDAPWIYLAVRPRVARWRYLRFHVETLEVEEISVSEFLAFKERLVNGDPEGPAVLEVDLGDFNREFQKLKDESTIGRGVEHLNRHLSGRLWQDLGKGDQRLLDFLRVHQYRGQQLMLNDRIRDFDGLRRAEQYLGRQPADAPWEEVAHRLQELGFEPGWGRTAARMRDTLRLLMDILDSPSPRTLERFLGRIPMIFSLAILSPHGYFGQANVLGRPDTGGQVVYILDQVRALEREMRRRLHEQGLDIEPQILVVTRLIPEAEGTTCDQRLEPIVGTENARILRVPFRNEDGEVLPHWISRFEVWPYLERFALDVEREILAELGGRPDLIIGNYSDGNLVATLLSQKLGVTQCNIAHALEKTKYLYSDLYWRDNEEQYHFSCQFTADLIAMNAADFIITSTYQEIAGTDDSVGQYESYSAFTMPGLYRVVNGIDVFDPKFNIVSPGADAEIYFPYTETERRLTGLHPEIEELIFGGEERPDARGVLADRDKPLLFTVARLDRIKNITGLVEWYGRSPRLRELANLLVVAGHVDPAKSSDREEREQIGRMHELMDRHGLDGQVRWLGVHLDKNLVGELYRYVADRRGAFVQPALFEAFGLTVIEAMSSGLPTFATRYGGPLEIIEHGVSGFHIDPNHGEEAAELIADFFERCAEDPGYWERISRGALERVRARYTWELYAERMMTLSRIYGFWKYVTNRERQVTRRYLQMFRHLQFRPLAHAVPLE

SEQ ID NO: 185 - protein, 793 aa, synthetic construct
MIEALREFLSEHRDAVYLLLRRYLGLGRPFLLRSDLWDEFAAFCAEDGEEEELLDSPLARAIRAAQEAVLDAPWIYLALRPRVARWEYLRIHLETLDVEEISVSEFLAFKERLVTGDGEGEAVLEVDLGDFNREFQKLKDESTIGRGVEHLNRHLSGRLWQDLGKGDQRLLEFLRVHQYRGQQLMLNDRITDFDALRRALQYLGRQPPDAPWEEVAHRLQELGFEPGWGRTAARMRETLRLLMDILDSPSPATLERFLGRIPMIFSIAILSPHGYFGQDNVLGRPDTGGQVVYILDQVRALEREMRQRLAEQGLDIEPRILVVTRLIPEAEGTTCDQRLEPIVGTENARILRVPFRNESGEVVPHWISRFEVWPYLERFALDVERELLAELGGRPDLIIGNYSDGNLVATLLAQKLGVTQCNIAHALEKTKYLYSDLYWRDNEEQYHFACQFTADLIAMNAADFIITSTYQEIAGTDDSVGQYESYAAFTMPGLYRVVNGIDVFDPKFNIVSPGADAEVYFPYTETERRLTGLHPEIEELLFGGEPRPDARGVLADRDKPLLFTVARLDRIKNITGLVEWYGRSERLRELANLLVIAGHVDPERSDDREERAQIQRMHQLMDEHGLDGQVRWLGVHLDKNLVGELYRYIADRRGAFVQPALFEAFGLTVIEAMSSGLPTFATCYGGPLEIIEHGVSGFHIDPNHGEAAAELIADFFERCAADPGYWERISQGALARVRARYTWELYAERMMTLSRIYGFWKYVTNRERQVTRRYLQMFRHLQYRPLAHAVPLE

SEQ ID NO: 186 - protein, 793 aa, synthetic construct
MIEELEQYLADHRDALYLLLRRYLGLGRPFLLRSDLWDEFQAFCEETGEEEGLADSPLARLIRHAQEAVLDAPWIYLAVRPRVARWEYLRIHVETLEVEEISVSEYLAFKERLVGGDAEGEAVLEVDLGDFNREFQKLKDESTIGRGVEHLNRHLSGRLWQDLGKGDQRLLDFLRVHQYRGQQLMLNDRIRDFDALRQALQYLGRQPPDAPWEEVAHELRRLGFEPGWGRTAARMRDTLRLLMDILDSPSPATLERFLGRIPMIFSLAILSPHGYFGQANVLGLPDTGGQVVYILDQVRALEREMRQRLAEQGLDIEPQILVVTRLIPEAGGTTCDQRLEPIVGTENARILRVPFRNEDGEVVPHWISRFEVWPYLERFALDVEREILAELGGRPDLIIGNYSDGNLVATLLSQKLGVTQCNIAHALEKTKYLYSDLYWRDNEEQYHFSCQFTADLIAMNAADFIITSTYQEIAGTDESVGQYESYSAFTMPGLYRVVNGIDVFDPKFNIVSPGADAEVYFPYTETERRLTGLHPEIEELVFGDEPRPDARGVLADPDKPLLFTVARLDRIKNITGLVEWYGASPRLRELANLLVIAGHVDPAQSDDREEREQIARMHELMDRHGLDGQVRWLGTHLDKNLVGELYRFVADRRGAFVQPALFEAFGLTVIEAMSSGLPTFATRYGGPLEIIEDGVSGFHIDPNHGEAAAELMADFFERCAADPGYWERISRGALERVRARYTWELYAERMMTLSRIYGFWKYVTNRERQVTRRYLQMFRHLQFRPLAHAVPLE

SEQ ID NO: 187 - protein, 793 aa, synthetic construct
MIETLRQFLAEHRDAVYLLLRHYVGLGRPFLLRSDLWDEFERFCEEHGEEEELADSPLARLIAKAQEAVLDAPWIYLAVRPRVARWEYLRIHLETLDVEEISVSEFLAFKERLVNGDPEGDAVLEVDLGDFNREFQKLKDESTIGRGVEHLNRHLSGRLWQDLGKGDERLLEFLRVHQYRGRQLMLNDRIRSFDELRRALQYLGRQPPDAPWEEVGHTLQELGFEPGWGRTVARIRDTLRLLMDILDSPSPETLERFLGRIPMIFSIAILSPHGYFGQSNVLGLPDTGGQVVYILDQVRALEREMRRRLAEQGLDIEPQILVVTRLIPEAGGTTCDQRLEPIVGTRNARILRVPFRNEDGEVVPHWISRFEIWPYLERFALDVERELLAELGGRPDLIIGNYSDGNLVATLLSQKLGVTQCNIAHALEKTKYLYSDLYWRDNEEQYHFSCQFTADLIAMNAADFIITSTYQEIAGTDDSVGQYESYAAFTMPGLYRVVNGIDVFDPKFNIVSPGADAEVYFPYTETERRLTGLHPEIEELIFGGEPRADSRGVLADRDKPLLFTVARLDRIKNITGLVEWYGESERLRELANLLVVAGHVDPARSGDREEREQIGRMHELMDEHGLDGQVRWLGVHLDKNLVGELYRYVADRRGAFVQPALFEAFGLTVIEAMSSGLPTFATCYGGPLEIIEHGVSGFHIDPNHGEEAAEKIADFFERCAADPGYWERISQGALARVRSRYTWELYAERMMTLSRIYGFWKYVTNRERQVTRRYLQMFRHLQFRPLAHAVPLE

SEQ ID NO: 188 - protein, 793 aa, synthetic construct
MIEELREFLAEHREAVYLLLRRYLALGRPFLLRSDLWDEFEAFCEEEGEEEELLDSPLARAIRRAQEAAVDAPWVYLAVRPRVARWRYLRFHVETLDVEEISVSEFLAFKERLVGGDAEGEAVLEVDLGDFNREFQKLKDESTIGRGVEHLNRHLSGRLWQDLGRGDQRLLEFLRVHQYRGQQLMLNDRIKDFDELRRALQYLGGQPPEAPWEEVAHELQELGFEPGWGRTVARIRETLRLLMDILDSPSPANLERFLGRIPMIFSIAILSPHGYFGQANVLGLPDTGGQVVYILDQVRALEREMRQRLAEQGLDIEPQILVVTRLIPEAEGTTCDQRLEPIVGTENARILRVPFRNEDGEVIPHWISRFEVWPYLERFALDVERELLAELGGRPDLIIGNYSDGNLVATLLSQKLGVTQCNIAHALEKTKYLYSDLYWRDNEAQYHFSCQFTADLIAMNAADFIITSTYQEIAGTDDSVGQYESYGAFTMPGLYRVVNGIDVFDPKFNIVSPGADAEVYFPYTETERRLTGLHPEIEELLYGGEPRPDARGVLADPDKPLLFTVARLDRIKNITGLVEWYGASPRLRELANLLVVAGHVDPAKSADREERAQIARMHELMDRYGLDGQVRWLGLHLEKNLVGELYRYVADRRGAFVQPALFEAFGLTVIEAMSSGLPTFATCYGGPLEIIEDGVSGFHIDPNHGDAAAEIMADFFERCAADPGYWERISRGALERVRARYTWELYAERMMTLSRIYGFWKYVTNRERQVTRRYLQMFRHLQFRPLAHAVPLE

SEQ ID NO: 189 - protein, 793 aa, synthetic construct
MIETLREFLAEHRDAVYLLLRHYLALGRPFLLRSDLWDEFLAFCAEEGEEEGLCDSPLARAIARTQEAVLDAPWIYLAVRPRVARWRYLRIHLETLEVEEISVSEFLAFKERLVTGAPEGEAVLEVDLGDFNREFQKLKDESTIGRGVEHLNRHLSGRLWQDLGKGDQRLLDFLRVHQYRGQQLMLNDRIRDFDALRRALQYLGRQPPEAPWEEVAHTLQALGFEPGWGRTAARMRDTMRLLMDILDSPSPATLERFLGRIPMIFSLAILSPHGYFGQANVLGLPDTGGQVVYILDQVRALEKEMRRRLAEQGLDIEPQILVVTRLIPEAGGTTCDQRLEPIVGTENARILRVPFRNEDGEVVPHWISRFEVWPYLERFALDVEKELLAELGGRPDLIIGNYSDGNLVATLLSQKLGVTQCNIAHALEKTKYLYSDLYWRDNEEQYHFSCQFTADLIAMNAADFIITSTYQEIAGTDDSVGQYESYSAFTMPGLYRVVNGIDVFDPKFNIVSPGADAEVYFPYTETERRLTGLHPEIEELIFGGEPRPDARGVLAEPDKPLLFTVARLDRIKNITGLVDWYGASPRLRELANLLVIAGHVDPARSDDEEEREQIERMHELMDRYGLDGQVRWLGLHLEKNLVGELYRYVADRRGAFVQPALFEAFGLTVIEAMASGLPTFATCYGGPLEIIEHGVSGFHIDPNHGEAAAERMADFFERCAAEPGYWERISQGALERVRSRYTWRLYAERMMTLSRIYGFWKYVTNRERQVTRRYLQMFRHLQFRPLAHAVPLE

SEQ ID NO: 190 - protein, 793 aa, synthetic construct
MIEALRQFLAEHRDAVYLLLRRYLGLGRPFLLRSDLWDEFARFCEEDGEEEGLADSPLGRVIRRTQEAAIDAPWIYFAVRPRVARWEYLRIHVETLEVEEISVSEYLAFKERLVTGDAEGDAVLEVDLGDFNREFQKLKDESTIGRGVEHLNRHLSGRLWQDLGKGDQRLLDFLRVHQYRGQQLMLNERIRSFDELRQALQYLGRQPDDAPWEEVAHKLQELGFEPGWGRTVARMRDTLRLLMDILDSPSPETLERFLGRIPMIFSLAILSPHGYFGQSNVLGRPDTGGQVVYILDQVRALEKEMRRRLAEQGLDIEPQILVVTRLIPEAEGTTCDQRLEPIVGTRNARILRVPFRNEDGEVLPHWISRFEVWPYLERFALDVERELLAELGGRPDLIIGNYSDGNLVATLLSQKLGVTQCNIAHALEKTKYLYSDLYWRDNEEQYHFSCQFTADLIAMNAADFIITSTYQEIAGTDDSVGQYESYAAFTMPGLYRVVNGIDVFDPKFNIVSPGADAEVYFPYTETERRLTGLHPEIEELVFGGEERPDARGVLADRDKPLLFTVARLDRIKNITGLVEWYGASPRLRELANLVVIAGHVDPAQSDDEEEREQIARMHELMDRHGLDGQVRWLGLHLDKNLVGELYRYVADRRGAFVQPALFEAFGLTVIEAMSSGLPTFATCYGGPLEIIEHGVSGFHIDPNHGEAAAELIADFFERCAAEPGYWERISQGALERVRARYTWELYAERMMTLSRIYGFWKYVTNRERQVTRRYLQMFRHLQFRPLAHAVPLE

SEQ ID NO: 191 - protein, 793 aa, synthetic construct
MIESLREFLAEHRDAVYRLLRHYLGLGRPFLLRSDLWDEFEAFCEEQGEEEELADSPLGRAIRRTQEAVLDAPWVYLAVRPRVARWEYLRFHLETLEVEEISVSEFLAFKERLVNGAAEGDAVLEVDFGDFNREFQKLKDESTIGRGVEHLNRHLSGRLWQDLGKGDQRLLDFLRVHQYRGRQLMLNDRIRDFDALRRALQYLGTQPPDAPWEEVAHTLQELGFEPGWGRTAARMRETLRLLMDILDSPSPGNLERFLGRIPMIFSIAILSPHGYFGQANVLGLPDTGGQVVYILDQVRALEREMRRRLHEQGLDIEPQILVVTRLIPEAGGTTCDQRLEPIVGTENARILRVPFRNEDGEVIPHWISRFEVWPYLERFAQDVEREILAELGGRPDLIIGNYSDGNLVATLLAQKLGVTQCNIAHALEKTKYLYSDLYWRDNEEQYHFSCQFTADLIAMNAADFIITSTYQEIAGTDDSVGQYESYAAFTMPGLYRVVNGIDVFDPKFNIVSPGADAEVYFPYTETERRLTGLHPEIEELLFGGEERPDARGVLADRDKPLLFTVARLDRIKNITGLVEWYGANERLRELANLLVVAGHVDPAQSSDREERAQIARMHELMDEYGLDGQVRWLGLHLDKNLVGELYRYVADRRGAFVQPALFEAFGLTVIEAMASGLPTFATRYGGPLEIIEHGVSGFHIDPNHGEEAAELIADFFERCAADPGYWERISQGALARVRSRYTWKLYAERMMTLSRIYGFWKYVTNRERQVTRRYLQMFRHLQFRPLAHAVPLE

SEQ ID NO: 192 - protein, 793 aa, synthetic construct
MIESLREYLAEHRDAVYLLLRRYLALGRPFLLRSDLWDEFDRFCEEEGEEEGLKDSPLARLIRAAQEAVVDAPWVYLAVRPRVARWRYLRIHVETLEVEEISVSEFLAFKERLVNGDAEGEAVLEVDLGDFNREFQKLKDESTIGRGVEHLNRHLSGRLWQDLGKGDRRLLEFLRVHQYRGQQLMLNGRITDFDALRRALQYLGRQPDDAPWDEVGHRLQELGFEPGWGRTAARMRDTLRLLMDILDSPSPETLERFLGRIPMIFSLAILSPHGYFGQANVLGLPDTGGQVVYILDQVRALEREMRRRLAEQGLDIEPQILVVTRLIPEAGGTTCDQRLEPIVGTENARILRVPFRNEDGEVVPQWISRFEVWPYLERFALDVERELLAELGGRPDLIIGNYSDGNLVATLLSQKLGVTQCNIAHALEKTKYLYSDLYWKDNEEQYHFSCQFTADLIAMNAADFIITSTYQEIAGTDDSVGQYESYSAFTMPGLYRVVNGIDVFDPKFNIVSPGADAEVYFPYTEKERRLTGLHPEIEELIYGGEPRPDARGVFAEPDKPLLFTVARLDRIKNITGLVEWYGASERLRELANLLVIAGHVDPAQSDDREERAQIERMHQLMDEYGLDGQVRWLGLHLDKNLVGELYRYVADRRGAFVQPALFEAFGLTVIEAMSSGLPTFATCYGGPLEIIEHGVSGFHIDPNHGEEAAEIIADFFERCAAEPGYWERISQGALERVRSRYTWELYAERMMTLSRIYGFWKYVTNRERQVTRRYLQMFRHLQFRPLAHAVPLE

SEQ ID NO: 193 - protein, 793 aa, synthetic construct
MIEELDQFLAEHRDAVYLLLRHYLGLGRPFLLRSDLWDEFLAFCEEEGEEEELLDSPLARLIARAQEAAIDAPWIYLALRPRVARWEYLRIHLETLDVEEISVSEFLAFKERLVNGDAEGEAVLEVDFGDFNREFQKLKDESTIGRGVEHLNRHLSGRLWQDLGKGDQRLLEFLRVHQYRGQQLMLNDRIRDFDELRQALQYLGGQPPEAPWEEVGHDLQRLGFEPGWGRTVARMRDTMRLLMDILDSPSPANLERFLGRIPMIFSIAILSPHGYFGQANVLGLPDTGGQVVYILDQVRALEREMRRRLAEQGLDIEPQILVVTRLIPEAGGTTCDQRLEPIVGTENARILRVPFRNEDGEVIPHWISRFEVWPYLERFALDAERELLAELGGRPDLIIGNYSDGNLVATLLSQKLGVTQCNIAHALEKTKYLYSDLYWRDNEEQYHFSCQFTADLIAMNAADFIITSTYQEIAGTDDSVGQYESYSAFTMPGLYRVVNGIDVFDPKFNIVSPGADAEVYFPYSEEERRLTGLHPEIEELIYGGEPRPDARGVLAERDKPLLFTVARLDRIKNITGLVEWYGRSERLRELANLLVVAGHVDPAQSGDEEERAQIRRMHELMDRYGLDGQVRWLGVHLDKNLVGELYRYVADRRGAFVQPALFEAFGLTVIEAMASGLPTFATCYGGPLEIIEDGVSGFHIDPNHGEEAAELIADFFERCAADPGYWERISRGALERVESRYTWELYAERMMTLSRIYGFWKYVTNRERQVTRRYLQMFRHLQFRPLAHAVPLE

SEQ ID NO: 194 - protein, 793 aa, synthetic construct
MIESLEEFLSEHRDALYLLLRRYVSLGRPFLLRSDLWDEFERFCEEEGEESPLKDSPLARAIAATQEAALDAPWIYLAVRPRVARWEYLRIHVETLEVEEISVSEFLAFKERLVNGDPEGDAVLEVDLGDFNREFQKLKDESTIGRGVEHLNRHLSGRLWQDLGKGDRRLLEFLRVHQYRGQQLMLNDRIRDFDELRRAEQYLGRQPPEAPWEEVAHTLQELGFEPGWGRTAARMRETLRLLMDILDSPSPATLERFLGRIPMIFSIAILSPHGYFGQANVLGLPDTGGQVVYILDQVRALEREMRRRLAEQGLDIEPQILVVTRLIPEAEGTTCDQRLEPIVGTENARILRVPFRNEDGEVLPHWISRFEVWPYLERFALDVERELLAELGGRPDLIIGNYSDGNLVATLLAQKLGVTQCNIAHALEKTKYLYSDLYWRDNEEQYHFSCQFTADLIAMNAADFIITSTYQEIAGTDDSVGQYESYSAFTMPGLYRVVNGIDVFDPKFNIVSPGADAEIYFPYTETERRLTGLHPEIEELVFGEEERPDARGVLADPDKPLLFTVARLDRIKNITGLVEWYGASERLRELANLLVVAGHVDPARSDDREERAQIARMHELMDEHGLDGQVRWLGVHLEKNLVGELYRYVADRRGAFVQPALFEAFGLTVIEAMSSGLPTFATCYGGPLEIIEDGVSGFHIDPNHGEEAAELIADFFERCAADPGYWERISRGALERVRERYTWELYAERLMTLSRIYGFWKYVTNRERQVTRRYLQMFRHLQFRPLAHAVPLE

SEQ ID NO: 195 - protein, 793 aa, synthetic construct
MLETLREFLSEHRDAVYLLLRRYLALGRPFLLRSDLWDEFLAFCEEQGEEEGLLDSPLARAIAQTQEAALDAPWIYLAVRPRVARWRYLRFHLETLDVEEISVSEFLAFKERLVEGDPEGEAVLEVDLGDFNREFQKLKDESTIGRGVEHLNRHLSGRLWQDLGKGDQRLLEFLRVHQYRGQQLMLNDRIDDFDGLRRAEQYLGRQPDDAPWEEVGHELQELGFEPGWGRTAARMRDTLRLLMDILDSPSPETLERFLGRIPMIFSIAILSPHGYFGQSNVLGLPDTGGQVVYILDQVRALEKEMRRRLAEQGLDIEPQILVVTRLIPEAGGTTCDQRLEPIVGTENARILRVPFRNEDGEVLPQWISRFEVWPYLERFALDVEREILAELGGRPDLIIGNYSDGNLVATLLAQKLGVTQCNIAHALEKTKYLYSDLYWRDNEPQYHFSCQFTADLIAMNAADFIITSTYQEIAGRDDSVGQYESYGAFTMPGLYRVVNGIDVFDPKFNIVSPGADAEVYFPYTETERRLTGLHPEIEELLFGGEERPDARGVLADRDKPLLFTVARLDRIKNITGLVEWYGASERLRELANLLVVAGHVDPEQSSDREEREQIERMHELMDRHGLDGQVRWLGLHLDKNLVGELYRYVADRRGAFVQPALFEAFGLTVIEAMASGLPTFATRYGGPLEIIEHGVSGFHIDPNHGEEAAELIADFFERCAAEPGYWERISRGALERVRSRYTWELYAERMMTLSRIYGFWKYVTNRERQVTRRYLQMFRHLQFRPLAHAVPLE

SEQ ID NO: 196 - protein, 793 aa, synthetic construct
MIEALREFLAEHRDAVYLLLRRYLGLGRPFLLRSDLWDEFEAFCEEQGEEEGLLDSPLARLIARTQEAALDAPWIYFAVRPRVARWEYLRIHLETLDVEEISVSEFLAFKERLVGGDAEGEAVLEVDLGDFNREFQKLKDESTIGRGVEHLNRHLSGRLWQDLGKGDQRLLDFLRVHQYRGQQLMLNDRIRDFDALRRALQYLGRQPPDAPWEDVAHELQDLGFEPGWGRTAARIRETMRLLMDILDSPSPETLERFLGRIPMIFSLAILSPHGYFGQANVLGLPDTGGQVVYILDQVRALEREMRRRLAEQGLDIEPQILVVTRLIPEAGGTTCDQRLEPIVGTRNARILRVPFRNEDGEIVPHWISRFEIWPYLERFALDVERELLAELGGRPDLIIGNYSDGNLVATLLSQKLGVTQCNIAHALEKTKYLYSDLYWQDNEPQYHFSCQFTADLIAMNAADFIITSTYQEIAGRDDSVGQYESYSAFTMPGLYRVVNGIDVFDPKFNIVSPGADAEVYFPYTETERRLTGLHPEIEELIFGGEDRPDARGVFADPDKPLLFTVARLDRIKNITGLVDWYGASPRLRELANLLVIAGHVDPARSGDREEREQIARMHELMDRHGLDGQVRWLGLHLDKNLVGELYRYVADRRGAFVQPALFEAFGLTVIEAMSSGLPTFATRYGGPLEIIEHGVSGFHIDPNHGEEAAELIADFFERCAAEPGYWERISRGALERVESRYTWKLYAERMMTLSRIYGFWKYVTNRERQVTRRYLQMFRHLQFRPLAHAVPLE

SEQ ID NO: 197 - protein, 793 aa, synthetic construct
MIEELRQQLLDSPRSWRAFLRHLVASQRDSWLHTDLQRACKTFREQPPEGYPEDIGWLADFVAHTQEAIFRDPWMVFAWRLRPGVWEYVRIHVEQLAVEELSTDEYLQAKEQLVGLGAEGEAVLTVDFEDFRPVSQRLKDESTIGDGLTHLNRHLAGRIWTDLAAGRSQILEFLGLHRLDNQNLMLSNGNTDFDSLRQTVQYLGTLPRETPWAEFREDMRRRGFEPGWGNTAGRVRETMRLLMDLLDSPSPAALESFLDRIPMISNVLIVSIHGWFAQDKVLGRPDTGGQVVYILDQARALEREMRNRLRQQGVDVEPRILIATRLIPESDGTTCDQRLEPVHGAENVQILRVPFRYEDGRIHPHWISRFKVWPYLERYASDLEREVKAELGSRPDLIIGNYSDGNLVATLLSEKLGVTQCNIAHALEKSKYLYSDLHWPDHEQDHHFACQFTADLIAMNAADIIVTSTYQEIAGNDREVGQYESHQDYTLPGLYRVENGIDVFDSKFNIVSPGADPRTYFSYARTEERFSSLWPEIESLLFGREPGPDIRGVLEDRQKPIILSMSRLDRIKNQSGLAELYGRSSRLRSLANLVIIGGHVDVQNSMDAEEREEIRRLHEIIDHYQLDGQFRLVGSQLDKTVVGELYRVVADGRGVFVQPALFEAFGLTVIEAMSSGLPVFATRHGGPLEIIEDGVSGFHIDPNDPEATAEKLADFLEAARERPKYWEEISDAALARVSERYTWERYAERLMTIARCFGFWRFVLSRESQVMERYLQMFRHLQWRPLAHAVPME

SEQ ID NO: 198 - protein, 793 aa, synthetic construct
MIEELRQQLLDSPRSWRAFLRHLVASQRDSWLHTDLQRACKTFREQPPEGYPEDIGWLADFVAHTQEAIFRDPWMVFAWRLRPGVWEYVRIHVEQLAVEELSTDEYLQAKEQLVGLGAEGEAVLTVDFEDFRPVSQRLKDESTIGDGLTHLNRHLAGRIWTDLAAGRSQILEFLGLHRLDNQNLMLSNGNTDFDSLRQTVQYLGTLPRETPWAEFREDMRRRGFEPGWGNTAGRVRETMRLLMDLLDSPSPAALESFLDRIPMISNVLIVSIHGWFAQDKVLGRPDTGGQVVYILDQARALEREMRNRLRQQGVDVEPRILIATRLIPESDGTTCDQRLEPVHGAENVQILRVPFRYEDGRIHPHWISRFKVWPYLERYASDLEREVKAELGSRPDLIIGNYSDGNLVATLLSEKLGVTQCNIAHALEKSKYLYSDLHWPDHEQDHHFACQFTADLIAMNAADIIVTSTYQEIAGNDREVGQYESHQDYTLPGLYRVENGIDVFDSKFNIVSPGADPRTYFSYARTEERFSSLWPEIESLWFGREPGPDIRGVLEDRQKPVILSMARMDRIKNLSGLAELYGRSSRLRSLANLIIIGGHVDVQNSMDAEEREEIRRMHEIMDHYQLDGQMRWIGSQLDKTVVGEIYRWVADGRGVWVQPALFEAFGLTVIEVMSSGLPVFATRHGGPLEIIEDGVSGFHIDPNDPEATAEKLADFLEAARERPKYWEEISDAALARVSERYTWERYAERLMTIARCFGFWRFVLSRESQVMERYLQMFRHLQWRPLAHAVPME

SEQ ID NO: 199 - protein, 793 aa, synthetic construct
MIEELRQQLLDSPRSWRAFLRHLVASQRDSWLHTDLQRACKTFREQPPEGYPEDIGWLADFVAHTQEAIFRDPWMVFAWRLRPGVWEYVRIHVEQLAVEELSTDEYLQAKEQLVGLGAEGEAVLTVDFEDFRPVSQRLKDESTIGDGLTHLNRHIAGRIWTDLAAGRSQIIEWLGLHRIDNQNLWLSNGNTDLDSLRQILQYLGTLPRETPWAEFREDWRRRGWEPGWGNTAGRVRETLRIWWDLMDSPSPAAWESWLDRLPLISNVLIVSIHGWFAQDKVLGRPDTGGQVVYILDQARALEREMRNRLRQQGIDIEPRILIATRLIPESDGTTCDQRLEPVHGAENVQILRVPFRYEDGRIHPHWISRFKVWPYLERYASDLEREVKAELGSRPDLIIGNYSDGNLVATLLSEKLGVTQCNIAHALEKSKYLYSDLHWPDHEQDHHFACQFTADLIAMNAADIIVTSTYQEIAGNDREVGQYESHQDYTLPGLYRVENGIDVFDSKFNIVSPGADPRTYFSYARTEERFSSLWPEIESLLFGREPGPDIRGVLEDRQKPIILSMARMDRIKNLSGLAELYGRSSRLRSLANLVIIGGHVDVQNSMDAEEREEIRRMHEIMDHYQLDGQMRWVGSQLDKTVVGELYRVVADGRGVFVQPALFEAFGLTVIEAMSSGLPVFATRHGGPLEIIEDGVSGFHIDPNDPEATAEKLADFLEAARERPKYWEEISDAALARVSERYTWERYAERLMTIARVFGWWRFVLSRESQVMERYLQMFRHLQWRPLAHAVPME

SEQ ID NO: 200 - protein, 793 aa, synthetic construct
MIEELRQQLLDSPRSWRAFLRHLVASQRDSWLHTDLQRACKTFREQPPEGYPEDIGWLADFVAHTQEAIFRDPWMVFAWRLRPGVWEYVRIHVEQLAVEELSTDEYLQAKEQLVGLGAEGEAVLTVDFEDFRPVSQRLKDESTIGDGLTHLNRHLAGRLWTDLAAGRSQLLEFLGLHRIDNQNLWLSNGNTDLDSLRQILQYLGTLPRETPWAEFREDLRRRGIEPGWGNTAGRVRETWRIWLDLLDSPSPAAIESWLDRLPLISNVLIVSIHGWFAQDKVLGRPDTGGQVVYILDQARALEREMRNRLRQQGIDIEPRILIATRLIPESDGTTCDQRLEPVHGAENVQILRVPFRYEDGRIHPHWISRFKVWPYLERYASDLEREVKAELGSRPDLIIGNYSDGNLVATLLSEKLGVTQCNIAHALEKSKYLYSDLHWPDHEQDHHFACQFTADLIAMNAADIIVTSTYQEIAGNDREVGQYESHQDYTLPGLYRVENGIDVFDSKFNIVSPGADPRTYFSYARTEERFSSLWPEIESLLFGREPGPDIRGVLEDRQKPIILSMARMDRIKNLSGLAELYGRSSRLRSLANLVIIGGHVDVQNSMDAEEREEIRRMHEIMDHYQLDGQMRWVGSQLDKTVVGELYRVVADGRGVFVQPALFEAFGLTVIEAMSSGLPVFATRHGGPLEIIEDGVSGFHIDPNDPEATAEKLADFLEAARERPKYWEEISDAALARVSERYTWERYAERLMTIARVFGWWRFILSRESQVMERYLQMFRHLQWRPLAHAVPME

SEQ ID NO: 201 - protein, 793 aa, synthetic construct
MIEELRQQLLDSPRSWRAFLRHLVASQRDSWLHTDLQRACKTFREQPPEGYPEDIGWLADFVAHTQEAIFRDPWMVFAWRLRPGVWEYVRIHVEQLAVEELSTDEYLQAKEQLVGLGAEGEAVLTVDFEDFRPVSQRLKDESTIGDGLTHLNRHLAGRLWTDLAAGRSQILEFLGLHRIDNQNLMLSNGNTDFDSLRQVMQYLGTQPRETPMAEVREDLRRRGFEPGWGNTAGRIRETMRLLYDLLDSPSPAALESFLDRIPMISNVLIVSIHGWFAQDKVLGRPDTGGQVVYILDQARALEREMRNRLRQQGIDVEPRILIATRLIPESDGTTCDQRLEPVHGAENVQILRVPFRYEDGRIHPHWISRFKVWPYLERYASDLEREVKAELGSRPDLIIGNYSDGNLVATLLSEKLGVTQCNIAHALEKSKYLYSDLHWPDHEQDHHFACQFTADLIAMNAADIIVTSTYQEIAGNDREVGQYESHQDYTLPGLYRVENGIDVFDSKFNIVSPGADPRTYFSYARTEERFSSLWPEIESLLFGREPGPDIRGVLEDRQKPIILSMARMDRIKNLSGLAELYGRSSRLRSLANLVIIGGHVDVQNSMDAEEREEIRRMHEIMDHYQLDGQMRWVGSQLDKTVVGELYRVVADGRGVFVQPALFEAFGLTVIEAMSSGLPVFATRHGGPLEIIEDGVSGFHIDPNDPEATAEKLADFLEAARERPKYWEEISDAALARVSERYTWERYAERLMTIARAFGFWRFVLSRESQVMERYLQMFRHLQWRPLAHAVPME

SEQ ID NO: 202 - protein, 793 aa, synthetic construct
MIEELRQQLLDSPRSWRAFLRHLVASQRDSWLHTDLQRACKTFREQPPEGYPEDIGWLADFVAHTQEAIFRDPWMVFAWRLRPGVWEYVRIHVEQLAVEELSTDEYLQAKEQLVGLGAEGEAVLTVDFEDFRPVSQRLKDESTIGDGLTHLNRHLAGRIWTDLAAGRSQILEFLGLHRLDNQNLMLSNGNTDFDSLRQTVQYLGTLPRETPWAEFREDMRRRGFEPGWGNTAGRVRETMRLLMDLLDSPSPAALESFLDRIPMISNILIVSIHGWFAQDKVLGRPDTGGQVVFILDQARAWEREIRNRLRQQGVDVEPRILIATRLIPESDGTTCDQRLEPVHGAENVQILRVPFRYEDGRIHPHWISRFKVWPYLERYASDLEREVKAELGSRPDIIVGNYSDGNLVATLLSEKLGVTQVNIAHALEKSKYLYSDLHWPDHEQDHHFACQFTADLIAMNAADMIITSTYQEIAGNDREVGQYESHQDYTLPGLYRVENGIDVFDSKFNILSPGADPRTYFSYARTEERFSSLWPEIESLLFGREPGPDIRGVLEDRQKPIILSMARMDRIKNLSGLAELYGRSSRLRSLANLVIIGGHVDVQNSMDAEEREEIRRMHEIMDHYQLDGQMRWVGSQLDKTVVGELYRVVADGRGVFVQPALFEAFGLTVIEAMSSGLPVFATRHGGPLEIIEDGVSGFHIDPNDPEATAEKLADFLEAARERPKYWEEISDAALARVSERYTWERWAERWLTWVRCWGFWRFVLSRESQVMERYLQMFRHLQWRPLAHAVPME

SEQ ID NO: 203 - protein, 793 aa, synthetic construct
MIEELRQQLLDSPRSWRAFLRHLVASQRDSWLHTDLQRACKTFREQPPEGYPEDIGWLADFVAHTQEAIFRDPWMVFAWRLRPGVWEYVRIHVEQLAVEELSTDEYLQAKEQLVGLGAEGEAVLTVDFEDFRPVSQRLKDESTIGDGLTHLNRHLAGRIWTDLAAGRSQILEFLGLHRLDNQNLMLSNGNTDFDSLRQTVQYLGTLPRETPWAEFREDMRRRGFEPGWGNTAGRVRETMRLLMDLLDSPSPAALESFLDRIPMISNILIVSIHGWFAQDKVLGRPDTGGQVVFILDQARALEREIRNRLRQQGVDVEPRILIATRLIPESDGTTCDQRLEPVHGAENVQILRVPFRYEDGRIHPHWISRFKVWPYLERYASDLEREVKAELGSRPDVIIGNYSDGNLVATLLSEKLGVTQVNIAHALEKSKYLYSDLHWPDHEQDHHFACQFTADLIAMNAADVIITSTYQEIAGNDREVGQYESHQDYTLPGLYRVENGIDVFDSKFNIISPGADPRTYFSYARTEERFSSLWPEIESLLFGREPGPDIRGVLEDRQKPIILSMARMDRIKNLSGLAELYGRSSRLRSLANLVIIGGHVDVQNSMDAEEREEIRRMHEIMDHYQLDGQMRWVGSQLDKTVVGELYRVVADGRGVFVQPALFEAFGLTVIEAMSSGLPVFATRHGGPLEIIEDGVSGFHIDPNDPEATAEKLADFLEAARERPKYWEEISDAALARVSERYTWERWAERWLTLMRCIGFWRFVLSRESQVMERYLQMFRHLQWRPLAHAVPME

SEQ ID NO: 204 - protein, 793 aa, synthetic construct
MIEELRQQLLDSPRSWRAFLRHLVASQRDSWLHTDLQRACKTFREQPPEGYPEDIGWLADFVAHTQEAIFRDPWMVFAWRLRPGVWEYVRIHVEQLAVEELSTDEYLQAKEQLVGLGAEGEAVLTVDFEDFRPVSQRLKDESTIGDGLTHLNRHLAGRIWTDLAAGRSQILEFLGLHRLDNQNLMLSNGNTDFDSLRQTVQYLGTLPRETPWAEFREDMRRRGFEPGWGNTAGRVRETMRLLMDLLDSPSPAALESFLDRIPMISNILIVSIHGWFAQDKVLGRPDTGGQVVWILDQARALERELRNRLRQQGVDVEPRILIATRLIPESDGTTCDQRLEPVHGAENVQILRVPFRYEDGRIHPHWISRFKVWPYLERYASDLEREVKAELGSRPDLIIGNYSDGNLVATLLSEKLGVTQVNVAHALEKSKYLYSDLHWPDHEQDHHFACQFTADLIAMNAADVIITSTYQEIAGNDREVGQYESHQDYTLPGLYRVENGIDVFDSKFNIISPGADPRTYFSYARTEERFSSLWPEIESLLFGREPGPDIRGVLEDRQKPIILSMARMDRIKNLSGLAELYGRSSRLRSLANLVIIGGHVDVQNSMDAEEREEIRRMHEIMDHYQLDGQMRWVGSQLDKTVVGELYRVVADGRGVFVQPALFEAFGLTVIEAMSSGLPVFATRHGGPLEIIEDGVSGFHIDPNDPEATAEKLADFLEAARERPKYWEEISDAALARVSERYTWERWAERLLTLWRCLGFWRFVLSRESQVMERYLQMFRHLQWRPLAHAVPME

SEQ ID NO: 205 - protein, 793 aa, synthetic construct
MIEELRQQLLDSPRSWRAFLRHLVASQRDSWLHTDLQRACKTFREQPPEGYPEDIGWLADFVAHTQEAIFRDPWMVFAWRLRPGVWEYVRIHVEQLAVEELSTDEYLQAKEQLVGLGAEGEAVLTVDFEDFRPVSQRLKDESTIGDGLTHLNRHLAGRIWTDLAAGRSQILEFLGLHRLDNQNLMLSNGNTDFDSLRQTVQYLGTLPRETPWAEFREDMRRRGFEPGWGNTAGRVRETMRLLMDLLDSPSPAALESFLDRIPMISNILIVSIHGWFAQDKVLGRPDTGGQVVWILDQARALERELRNRLRQQGVDVEPRILIATRLIPESDGTTCDQRLEPVHGAENVQILRVPFRYEDGRIHPHWISRFKVWPYLERYASDLEREVKAELGSRPDVIIGNYSDGNLVATLLSEKLGVTQINIAHALEKSKYLYSDLHWPDHEQDHHFACQFTADLIAMNAADMIITSTYQEIAGNDREVGQYESHQDYTLPGLYRVENGIDVFDSKFNIISPGADPRTYFSYARTEERFSSLWPEIESLLFGREPGPDIRGVLEDRQKPIILSMARMDRIKNLSGLAELYGRSSRLRSLANLVIIGGHVDVQNSMDAEEREEIRRMHEIMDHYQLDGQMRWVGSQLDKTVVGELYRVVADGRGVFVQPALFEAFGLTVIEAMSSGLPVFATRHGGPLEIIEDGVSGFHIDPNDPEATAEKLADFLEAARERPKYWEEISDAALARVSERYTWERWAERWLTIVRCYGFWRFVLSRESQVMERYLQMFRHLQWRPLAHAVPME

SEQ ID NO: 206 - protein, 793 aa, synthetic construct
MIEELRQQLLDSPRSWRAFLRHLVASQRDSWLHTDLQRACKTFREQPPEGYPEDIGWLADFVAHTQEAIFRDPWMVFAWRLRPGVWEYVRIHVEQLAVEELSTDEYLQAKEQLVGLGAEGEAVLTVDFEDFRPVSQRLKDESTIGDGLTHLNRHLAGRIWTDLAAGRSQILEFLGLHRLDNQNLMLSNGNTDFDSLRQTVQYLGTLPRETPWAEFREDMRRRGFEPGWGNTAGRVRETMRLLMDLLDSPSPAALESFLDRIPMISNVLIVSIHGWFAQDKVLGRPDTGGQVVYILDQARALEREMRNRLRQQGVDVEPRILIATRLIPESDGTTCDQRLEPVHGAENVQILRVPFRYEDGRIHPHWISRFKVWPYLERYASDLEREVKAELGSRPDLIIGNYSDGNLVATLLSEKLGVTQINIAHALEKSKYLYSDLHWPDHEQDHHFACQFTADLIAMNAADAIVTSTYQEIAGNDREVGQYESHQDYTLPGLYRVENGIDVFDSKFNIISPGADPRTYFSYARTEERFSSLWPEIESLLFGREPGPDIRGVLEDRQKPIILSMARMDRIKNLSGLAELYGRSSRLRSLANLVIIGGHVDVQNSMDAEEREEIRRMHEIMDHYQLDGQMRWVGSQLDKTVVGELYRVVADGRGVFVQPALFEAFGLTVIEAMSSGLPVFATRHGGPLEIIEDGVSGFHIDPNDPEATAEKLADFLEAARERPKYWEEISDAALARVSERYTWERYAERLLTLARCIGFWRFVLSRESQVMERYLQMFRHLQWRPLAHAVPME

SEQ ID NO: 207 - protein, 793 aa, synthetic construct
MIEELRQQLLDSPRSWRAFLRHLVASQRDSWLHTDLQRACKTFREQPPEGYPEDIGWLADFVAHTQEAIFRDPWMVFAWRLRPGVWEYVRIHVEQLAVEELSTDEYLQAKEQLVGLGAEGEAVLTVDFEDFRPVSQRLKDESTIGDGLTHLNRHLAGRIWTDLAAGRSQILEFLGLHRLDNQNLMLSNGNTDFDSLRQTVQYLGTLPRETPWAEFREDMRRRGFEPGWGNTAGRVRETMRLLMDLLDSPSPAALESFLDRIPMISNVIIISIHGWFAQDKVLGRPDTGGQVVYILDQARALEREMRNRLRQQGVDVEPRIIILTRLIPESDGTTCDQRLEPVHGAENVQILRIPFRYEDGRIHPHWISRFKVWPYLERWVSDVEREIKAELGSRPDLIIGNYSDGNLVATLLSEKWGVTQCNIAHALEKSKYLYSDLHWPDHEQDHHFACQFTADLIAMNAADIIVTSTYQEIAGNDREVGQYESHQDYTLPGLYRVENGIDVFDSKFNIVSPGADPRTYFSYARTEERFSSLWPEIESLLFGREPGPDIRGVLEDRQKPIILSMARMDRIKNLSGLAELYGRSSRLRSLANLVIIGGHVDVQNSMDAEEREEIRRMHEIMDHYQLDGQMRWVGSQLDKTVVGELYRVVADGRGVFVQPALFEAFGLTVIEAMSSGLPVFATRHGGPLEIIEDGVSGFHIDPNDPEATAEKLADFLEAARERPKYWEEISDAALARVSERYTWERYAERLMTIARCFGFWRFVLSRESQVMERYLQMFRHLQWRPLAHAVPME

SEQ ID NO: 208 - protein, 793 aa, synthetic construct
MIEELRQQLLDSPRSWRAFLRHLVASQRDSWLHTDLQRACKTFREQPPEGYPEDIGWLADFVAHTQEAIFRDPWMVFAWRLRPGVWEYVRIHVEQLAVEELSTDEYLQAKEQLVGLGAEGEAVLTVDFEDFRPVSQRLKDESTIGDGLTHLNRHLAGRIWTDLAAGRSQILEFLGLHRLDNQNLMLSNGNTDFDSLRQTVQYLGTLPRETPWAEFREDMRRRGFEPGWGNTAGRVRETMRLLMDLLDSPSPAALESFLDRIPMISNVVIVSIHGWFAQDKVLGRPDTGGQVVYILDQARALEREMRNRLRQQGVDVEPRILILTRLIPESDGTTCDQRLEPVHGAENVQILRVPFRYEDGRIHPHWISRFKVWPYLERFASDAEREIKAELGSRPDLIIGNYSDGNLVATLLSEKLGVTQCNIAHALEKSKYLYSDLHWPDHEQDHHFACQFTADLIAMNAADIIVTSTYQEIAGNDREVGQYESHQDYTLPGLYRVENGIDVFDSKFNIVSPGADPRTYFSYARTEERFSSLWPEIESLLFGREPGPDIRGVLEDRQKPIILSMARMDRIKNLSGLAELYGRSSRLRSLANLVIIGGHVDVQNSMDAEEREEIRRMHEIMDHYQLDGQMRWVGSQLDKTVVGELYRVVADGRGVFVQPALFEAFGLTVIEAMSSGLPVFATRHGGPLEIIEDGVSGFHIDPNDPEATAEKLADFLEAARERPKYWEEISDAALARVSERYTWERYAERLMTIARCFGFWRFVLSRESQVMERYLQMFRHLQWRPLAHAVPME

SEQ ID NO: 209 - protein, 793 aa, synthetic construct
MIEELRQQLLDSPRSWRAFLRHLVASQRDSWLHTDLQRACKTFREQPPEGYPEDIGWLADFVAHTQEAIFRDPWMVFAWRLRPGVWEYVRIHVEQLAVEELSTDEYLQAKEQLVGLGAEGEAVLTVDFEDFRPVSQRLKDESTIGDGLTHLNRHLAGRIWTDLAAGRSQILEFLGLHRLDNQNLMLSNGNTDFDSLRQTVQYLGTLPRETPWAEFREDMRRRGFEPGWGNTAGRVRETMRLLMDLLDSPSPAALESFLDRIPMISNVLIVSIHGWFAQDKVLGRPDTGGQVVYILDQARALEREMRNRLRQQGVDVEPRILIATRLIPESDGTTCDQRLEPVHGAENVQILRVPFRYEDGRIHPHWISRFKVWPYLERYASDLEREVKAELGSRPDLIIGNYSDGNLVATLLSEKLGVTQCNIAHALEKSKYLYSDLHWPDHEQDHHFACQFTADLIAMNAADIIVTSTYQEIAGNDREVGQYESHQDYTLPGLYRVENGIDVFDSKFNIVSPGADPRTYFSYARTEERFSSLWPEIESLLFGREPGPDIRGVLEDRQKPIILSMMRLDRIKNMSGWLEIYGRSSRLRSLANLVLIGGHVDVQNSMDAEEREEVRRLHEILDHYQLDGQVRWVGSQLDKTVVGELYRVVADGRGIFIQPALFEAFGLTVIEAMSSGLPVWATRHGGPLEIIEDGVSGFHIDPNDPEATLEKIADWLEAARERPKYWEEISDAALARVSERYTWERYAERLMTIARCFGFWRFVLSRESQVMERYLQMFRHLQWRPLAHAVPME

SEQ ID NO: 210 - protein, 793 aa, synthetic construct
MIEELRQQLLDSPRSWRAFLRHLVASQRDSWLHTDLQRACKTFREQPPEGYPEDIGWLADFVAHTQEAIFRDPWMVFAWRLRPGVWEYVRIHVEQLAVEELSTDEYLQAKEQLVGLGAEGEAVLTVDFEDFRPVSQRLKDESTIGDGLTHLNRHLAGRIWTDLAAGRSQILEFLGLHRLDNQNLMLSNGNTDFDSLRQTVQYLGTLPRETPWAEFREDMRRRGFEPGWGNTAGRVRETMRLLMDLLDSPSPAALESFLDRIPMISNVLIVSIHGWFAQDKVLGRPDTGGQVVYILDQARALEREMRNRLRQQGVDVEPRILIATRLIPESDGTTCDQRLEPVHGAENVQILRVPFRYEDGRIHPHWISRFKVWPYLERYASDLEREVKAELGSRPDLIIGNYSDGNLVATLLSEKLGVTQCNIAHALEKSKYLYSDLHWPDHEQDHHFACQFTADLIAMNAADIIVTSTYQEIAGNDREVGQYESHQDYTLPGLYRVENGIDVFDSKFNIVSPGADPRTYFSYARTEERFSSLWPEIESLWFGREPGPDIRGVLEDRQKPLILSIARMDRIKNLSGLAELYGRSSRLRSLANLLIIGGHVDVQNSMDAEEREEIRRMHEIMDHYQLDGQMRWIGSQLDKTLVGEIYRVLADGRGVVVQPALFEAFGLTVIEVMSSGLPVFATRHGGPLEIIEDGVSGFHIDPNDPEATAEKLADFLEAARERPKYWEEISDAALARVSERYTWERYAERLMTIARCFGFWRFVLSRESQVMERYLQMFRHLQWRPLAHAVPME

SEQ ID NO: 211 - protein, 793 aa, synthetic construct
MIEELRQQLLDSPRSWRAFLRHLVASQRDSWLHTDLQRACKTFREQPPEGYPEDIGWLADFVAHTQEAIFRDPWMVFAWRLRPGVWEYVRIHVEQLAVEELSTDEYLQAKEQLVGLGAEGEAVLTVDFEDFRPVSQRLKDESTIGDGLTHLNRHLAGRIWTDLAAGRSQILEFLGLHRLDNQNLMLSNGNTDFDSLRQTVQYLGTLPRETPWAEFREDMRRRGFEPGWGNTAGRVRETMRLLMDLLDSPSPAALESFLDRIPMISNVLIVSIHGWFAQDKVLGRPDTGGQVVYILDQARALEREMRNRLRQQGVDVEPRILIATRLIPESDGTTCDQRLEPVHGAENVQILRVPFRYEDGRIHPHWISRFKVWPYLERYASDLEREVKAELGSRPDLIIGNYSDGNLVATLLSEKLGVTQCNIAHALEKSKYLYSDLHWPDHEQDHHFACQFTADLIAMNAADIIVTSTYQEIAGNDREVGQYESHQDYTLPGLYRVENGIDVFDSKFNIVSPGADPRTYFSYARTEERFSSLWPEIESIIFGREPGPDIRGVLEDRQKPIILSIARMDRIKNLSGLAELYGRSSRLRSLANLIIIGGHVDVQNSMDAEEREEIRRMHEIMDHYQLDGQMRWIGSQLDKTWVGELYRWLADGRGVVVQPALFEAFGLTVIEVMSSGLPVFATRHGGPLEIIEDGVSGFHIDPNDPEATAEKLADFLEAARERPKYWEEISDAALARVSERYTWERYAERLMTIARCFGFWRFVLSRESQVMERYLQMFRHLQWRPLAHAVPME

SEQ ID NO: 212 - protein, 793 aa, synthetic construct
MIEELRQQLLDSPRSWRAFLRHLVASQRDSWLHTDLQRACKTFREQPPEGYPEDIGWLADFVAHTQEAIFRDPWMVFAWRLRPGVWEYVRIHVEQLAVEELSTDEYLQAKEQLVGLGAEGEAVLTVDFEDFRPVSQRLKDESTIGDGLTHLNRHLAGRIWTDLAAGRSQILEFLGLHRLDNQNLMLSNGNTDFDSLRQTVQYLGTLPRETPWAEFREDMRRRGFEPGWGNTAGRVRETMRLLMDLLDSPSPAALESFLDRIPMISNVLIVSIHGWFAQDKVLGRPDTGGQVVYILDQARALEREMRNRLRQQGVDVEPRILIATRLIPESDGTTCDQRLEPVHGAENVQILRVPFRYEDGRIHPHWISRFKVWPYLERYASDLEREVKAELGSRPDLIIGNYSDGNLVATLLSEKLGVTQCNIAHALEKSKYLYSDLHWPDHEQDHHFACQFTADLIAMNAADIIVTSTYQEIAGNDREVGQYESHQDYTLPGLYRVENGIDVFDSKFNIVSPGADPRTYFSYARTEERFSSLWPEIESMWFGREPGPDIRGVLEDRQKPIILSIARMDRIKNLSGLAELYGRSSRLRSLANLIIIGGHVDVQNSMDAEEREEIRRMHEIMDHYQLDGQMRWIGSQLDKTLVGEIYRVLADGRGVVVQPALFEAFGLTVIEVMSSGLPVFATRHGGPLEIIEDGVSGFHIDPNDPEATAEKLADFLEAARERPKYWEEISDAALARVSERYTWERYAERLMTIARCFGFWRFVLSRESQVMERYLQMFRHLQWRPLAHAVPME

SEQ ID NO: 213 - protein, 793 aa, synthetic construct
MIEELRQQLLDSPRSWRAFLRHLVASQRDSWLHTDLQRACKTFREQPPEGYPEDIGWLADFVAHTQEAIFRDPWMVFAWRLRPGVWEYVRIHVEQLAVEELSTDEYLQAKEQLVGLGAEGEAVLTVDFEDFRPVSQRLKDESTIGDGLTHLNRHLAGRIWTDLAAGRSQILEFLGLHRLDNQNLMLSNGNTDFDSLRQTVQYLGTLPRETPWAEFREDMRRRGFEPGWGNTAGRVRETMRLLMDLLDSPSPAALESFLDRIPMISNVLIVSIHGWFAQDKVLGRPDTGGQVVYILDQARALEREMRNRLRQQGVDVEPRILIATRLIPESDGTTCDQRLEPVHGAENVQILRVPFRYEDGRIHPHWISRFKVWPYLERYASDLEREVKAELGSRPDLIIGNYSDGNLVATLLSEKLGVTQCNIAHALEKSKYLYSDLHWPDHEQDHHFACQFTADLIAMNAADIIVTSTYQEIAGNDREVGQYESHQDYTLPGLYRVENGIDVFDSKFNIVSPGADPRTYFSYARTEERFSSLWPEIESIWFGREPGPDIRGVLEDRQKPIILSMARMDRIKNLSGLAELYGRSSRLRSLANLIIIGGHVDVQNSMDAEEREEIRRMHEIMDHYQLDGQMRWIGSQLDKTLVGEIYRVLADGRGVVVQPALFEAFGLTVIEVMSSGLPVFATRHGGPLEIIEDGVSGFHIDPNDPEATAEKLADFLEAARERPKYWEEISDAALARVSERYTWERYAERLMTIARCFGFWRFVLSRESQVMERYLQMFRHLQWRPLAHAVPME

SEQ ID NO: 214 - protein, 793 aa, synthetic construct
MIEELRQQLLDSPRSWRAFLRHLVASQRDSWLHTDLQRACKTFREQPPEGYPEDIGWLADFVAHTQEAIFRDPWMVFAWRLRPGVWEYVRIHVEQLAVEELSTDEYLQAKEQLVGLGAEGEAVLTVDFEDFRPVSQRLKDESTIGDGLTHLNRHIAGRLWTDTAAGRSQILEWLGLHRIDNQNLWWSNGNTDWDSVRQILQYLGTVPRETPWAELREDWRRRGWEPGWGNTAGRIRETLRILWDLIDSPSPAAWESWLDRVPIISNVLIVSIHGWFAQDKVLGRPDTGGQVVYILDQARALEREMRNRLRQQGIDVEPRILIATRLIPESDGTTCDQRLEPVHGAENVQILRVPFRYEDGRIHPHWISRFKVWPYLERYASDLEREVKAELGSRPDLIIGNYSDGNLVATLLSEKLGVTQCNIAHALEKSKYLYSDLHWPDHEQDHHFACQFTADLIAMNAADIIVTSTYQEIAGNDREVGQYESHQDYTLPGLYRVENGIDVFDSKFNIVSPGADPRTYFSYARTEERFSSLWPEIESLLFGREPGPDIRGVLEDRQKPIILSMARMDRIKNLSGLAELYGRSSRLRSLANLVIIGGHVDVQNSMDAEEREEIRRMHEIMDHYQLDGQMRWVGSQLDKTVVGELYRVVADGRGVFVQPALFEAFGLTVIEAMSSGLPVFATRHGGPLEIIEDGVSGFHIDPNDPEATAEKLADFLEAARERPKYWEEISDAALARVSERYTWERYAERLMTIARVFGWWRFVLSRESQVMERYLQMFRHLQWRPLAHAVPME

SEQ ID NO: 215 - protein, 793 aa, synthetic construct
MIEELRQQLLDSPRSWRAFLRHLVASQRDSWLHTDLQRACKTFREQPPEGYPEDIGWLADFVAHTQEAIFRDPWMVFAWRLRPGVWEYVRIHVEQLAVEELSTDEYLQAKEQLVGLGAEGEAVLTVDFEDFRPVSQRLKDESTIGDGLTHLNRHIAGRLWTDLAAGRSQLLEWLGLHRIDNQNLWWSNGNTDWDSVRQILQYLGTLPRETPWAELREDWRRRGIEPGWGNTAGRVRETLRILWDLMDSPSPAALESWLDRVPIISNVLIVSIHGWFAQDKVLGRPDTGGQVVYILDQARALEREMRNRLRQQGIDVEPRILIATRLIPESDGTTCDQRLEPVHGAENVQILRVPFRYEDGRIHPHWISRFKVWPYLERYASDLEREVKAELGSRPDLIIGNYSDGNLVATLLSEKLGVTQCNIAHALEKSKYLYSDLHWPDHEQDHHFACQFTADLIAMNAADIIVTSTYQEIAGNDREVGQYESHQDYTLPGLYRVENGIDVFDSKFNIVSPGADPRTYFSYARTEERFSSLWPEIESLLFGREPGPDIRGVLEDRQKPIILSMARMDRIKNLSGLAELYGRSSRLRSLANLVIIGGHVDVQNSMDAEEREEIRRMHEIMDHYQLDGQMRWVGSQLDKTVVGELYRVVADGRGVFVQPALFEAFGLTVIEAMSSGLPVFATRHGGPLEIIEDGVSGFHIDPNDPEATAEKLADFLEAARERPKYWEEISDAALARVSERYTWERYAERLMTIARVFGLWRFWLSRESQVMERYLQMFRHLQWRPLAHAVPME

SEQ ID NO: 216 - protein, 793 aa, synthetic construct
MIEELRQQLLDSPRSWRAFLRHLVASQRDSWLHTDLQRACKTFREQPPEGYPEDIGWLADFVAHTQEAIFRDPWMVFAWRLRPGVWEYVRIHVEQLAVEELSTDEYLQAKEQLVGLGAEGEAVLTVDFEDFRPVSQRLKDESTIGDGLTHINRHIAGRLWTDLAAGRSQILEWLGLHRIDNQNLWWSNGNTDWDSLRQIMQYLGTIPRETPWAELREDWRRRGWEPGWGNTAGRVRETLRIWLDLLDSPSPAAWESWLDRVPIISNVLIVSIHGWFAQDKVLGRPDTGGQVVYILDQARALEREMRNRLRQQGIDVEPRILIATRLIPESDGTTCDQRLEPVHGAENVQILRVPFRYEDGRIHPHWISRFKVWPYLERYASDLEREVKAELGSRPDLIIGNYSDGNLVATLLSEKLGVTQCNIAHALEKSKYLYSDLHWPDHEQDHHFACQFTADLIAMNAADIIVTSTYQEIAGNDREVGQYESHQDYTLPGLYRVENGIDVFDSKFNIVSPGADPRTYFSYARTEERFSSLWPEIESLLFGREPGPDIRGVLEDRQKPIILSMARMDRIKNLSGLAELYGRSSRLRSLANLVIIGGHVDVQNSMDAEEREEIRRMHEIMDHYQLDGQMRWVGSQLDKTVVGELYRVVADGRGVFVQPALFEAFGLTVIEAMSSGLPVFATRHGGPLEIIEDGVSGFHIDPNDPEATAEKLADFLEAARERPKYWEEISDAALARVSERYTWERYAERLMTIARVFGWWRFVLSRESQVMERYLQMFRHLQWRPLAHAVPME

SEQ ID NO: 217 - protein, 793 aa, synthetic construct
MIEELRQQLLDSPRSWRAFLRHLVASQRDSWLHTDLQRACKTFREQPPEGYPEDIGWLADFVAHTQEAIFRDPWMVFAWRLRPGVWEYVRIHVEQLAVEELSTDEYLQAKEQLVGLGAEGEAVLTVDFEDFRPVSQRLKDESTIGDGLTHLNRHLAGRMWTDSAAGRSQLIEFLGLHRLDNQNLMWSNGNTDLDSTRQVLQYLGTLPRETPLAEFREDLRRRGFEPGWGNTAGRIRETMRLLADLLDSPSPAALESFLDRIPMISNVLIVSIHGWFAQDKVLGRPDTGGQVVYILDQARALEREMRNRLRQQGIDVEPRILIATRLIPESDGTTCDQRLEPVHGAENVQILRVPFRYEDGRIHPHWISRFKVWPYLERYASDLEREVKAELGSRPDLIIGNYSDGNLVATLLSEKLGVTQCNIAHALEKSKYLYSDLHWPDHEQDHHFACQFTADLIAMNAADIIVTSTYQEIAGNDREVGQYESHQDYTLPGLYRVENGIDVFDSKFNIVSPGADPRTYFSYARTEERFSSLWPEIESLLFGREPGPDIRGVLEDRQKPIILSMARMDRIKNLSGLAELYGRSSRLRSLANLVIIGGHVDVQNSMDAEEREEIRRMHEIMDHYQLDGQMRWVGSQLDKTVVGELYRVVADGRGVFVQPALFEAFGLTVIEAMSSGLPVFATRHGGPLEIIEDGVSGFHIDPNDPEATAEKLADFLEAARERPKYWEEISDAALARVSERYTWERYAERLMTIARAFGFWRFVLSRESQVMERYLQMFRHLQWRPLAHAVPME

SEQ ID NO: 218 - protein, 793 aa, synthetic construct
MIEELRQQLLDSPRSWRAFLRHLVASQRDSWLHTDLQRACKTFREQPPEGYPEDIGWLADFVAHTQEAIFRDPWMVFAWRLRPGVWEYVRIHVEQLAVEELSTDEYLQAKEQLVGLGAEGEAVLTVDFEDFRPVSQRLKDESTIGDGLTHLNRHLAGRIWTDLAAGRSQILEFLGLHRLDNQNLMLSNGNTDFDSLRQTVQYLGTLPRETPWAEFREDMRRRGFEPGWGNTAGRVRETMRLLMDLLDSPSPAALESFLDRIPMISNILIVSIHGWFAQDKVLGRPDTGGQVVWILDQARAIEREIRNRLRQQGVDVEPRILIATRLIPESDGTTCDQRLEPVHGAENVQILRVPFRYEDGRIHPHWISRFKVWPYLERYASDLEREVKAELGSRPDVIIGNYSDGNLVATLLSEKLGVTQVNFAHALEKSKYLYSDLHWPDHEQDHHFACQFTADLIAMNAADVIITSTYQEIAGNDREVGQYESHQDYTLPGLYRVENGIDVFDSKFNIISPGADPRTYFSYARTEERFSSLWPEIESLLFGREPGPDIRGVLEDRQKPIILSMARMDRIKNLSGLAELYGRSSRLRSLANLVIIGGHVDVQNSMDAEEREEIRRMHEIMDHYQLDGQMRWVGSQLDKTVVGELYRVVADGRGVFVQPALFEAFGLTVIEAMSSGLPVFATRHGGPLEIIEDGVSGFHIDPNDPEATAEKLADFLEAARERPKYWEEISDAALARVSERYTWERWAERLLTLWRCLGFWRFVLSRESQVMERYLQMFRHLQWRPLAHAVPME

SEQ ID NO: 219 - protein, 793 aa, synthetic construct
MIEELRQQLLDSPRSWRAFLRHLVASQRDSWLHTDLQRACKTFREQPPEGYPEDIGWLADFVAHTQEAIFRDPWMVFAWRLRPGVWEYVRIHVEQLAVEELSTDEYLQAKEQLVGLGAEGEAVLTVDFEDFRPVSQRLKDESTIGDGLTHLNRHLAGRIWTDLAAGRSQILEFLGLHRLDNQNLMLSNGNTDFDSLRQTVQYLGTLPRETPWAEFREDMRRRGFEPGWGNTAGRVRETMRLLMDLLDSPSPAALESFLDRIPMISNILIVSIHGWFAQDKVLGRPDTGGQVVWILDQARALERELRNRLRQQGVDVEPRILIATRLIPESDGTTCDQRLEPVHGAENVQILRVPFRYEDGRIHPHWISRFKVWPYLERYASDLEREVKAELGSRPDVIIGNYSDGNLVATLLSEKLGVTQINFAHALEKSKYLYSDLHWPDHEQDHHFACQFTADLIAMNAADIIITSTYQEIAGNDREVGQYESHQDYTLPGLYRVENGIDVFDSKFNIISPGADPRTYFSYARTEERFSSLWPEIESLLFGREPGPDIRGVLEDRQKPIILSMARMDRIKNLSGLAELYGRSSRLRSLANLVIIGGHVDVQNSMDAEEREEIRRMHEIMDHYQLDGQMRWVGSQLDKTVVGELYRVVADGRGVFVQPALFEAFGLTVIEAMSSGLPVFATRHGGPLEIIEDGVSGFHIDPNDPEATAEKLADFLEAARERPKYWEEISDAALARVSERYTWERWAERWLTLVRCWGFWRFVLSRESQVMERYLQMFRHLQWRPLAHAVPME

SEQ ID NO: 220 - protein, 793 aa, synthetic construct
MIEELRQQLLDSPRSWRAFLRHLVASQRDSWLHTDLQRACKTFREQPPEGYPEDIGWLADFVAHTQEAIFRDPWMVFAWRLRPGVWEYVRIHVEQLAVEELSTDEYLQAKEQLVGLGAEGEAVLTVDFEDFRPVSQRLKDESTIGDGLTHLNRHLAGRIWTDLAAGRSQILEFLGLHRLDNQNLMLSNGNTDFDSLRQTVQYLGTLPRETPWAEFREDMRRRGFEPGWGNTAGRVRETMRLLMDLLDSPSPAALESFLDRIPMISNVLIVSIHGWFAQDKVLGRPDTGGQVVFILDQARALEREMRNRLRQQGVDVEPRILIATRLIPESDGTTCDQRLEPVHGAENVQILRVPFRYEDGRIHPHWISRFKVWPYLERYASDLEREVKAELGSRPDAIIGNYSDGNLVATLLSEKLGVTQINIAHALEKSKYLYSDLHWPDHEQDHHFACQFTADLIAMNAADAIVTSTYQEIAGNDREVGQYESHQDYTLPGLYRVENGIDVFDSKFNIISPGADPRTYFSYARTEERFSSLWPEIESLLFGREPGPDIRGVLEDRQKPIILSMARMDRIKNLSGLAELYGRSSRLRSLANLVIIGGHVDVQNSMDAEEREEIRRMHEIMDHYQLDGQMRWVGSQLDKTVVGELYRVVADGRGVFVQPALFEAFGLTVIEAMSSGLPVFATRHGGPLEIIEDGVSGFHIDPNDPEATAEKLADFLEAARERPKYWEEISDAALARVSERYTWERYAERLMTLIRCMGFWRFVLSRESQVMERYLQMFRHLQWRPLAHAVPME

SEQ ID NO: 221 - protein, 793 aa, synthetic construct
MIEELRQQLLDSPRSWRAFLRHLVASQRDSWLHTDLQRACKTFREQPPEGYPEDIGWLADFVAHTQEAIFRDPWMVFAWRLRPGVWEYVRIHVEQLAVEELSTDEYLQAKEQLVGLGAEGEAVLTVDFEDFRPVSQRLKDESTIGDGLTHLNRHLAGRIWTDLAAGRSQILEFLGLHRLDNQNLMLSNGNTDFDSLRQTVQYLGTLPRETPWAEFREDMRRRGFEPGWGNTAGRVRETMRLLMDLLDSPSPAALESFLDRIPMISNVLIVSIHGWFAQDKVLGRPDTGGQVVYILDQARALERELRNRLRQQGVDVEPRILIATRLIPESDGTTCDQRLEPVHGAENVQILRVPFRYEDGRIHPHWISRFKVWPYLERYASDLEREVKAELGSRPDLIIGNYSDGNLVATLLSEKLGVTQMNIAHALEKSKYLYSDLHWPDHEQDHHFACQFTADLIAMNAADVIVTSTYQEIAGNDREVGQYESHQDYTLPGLYRVENGIDVFDSKFNIISPGADPRTYFSYARTEERFSSLWPEIESLLFGREPGPDIRGVLEDRQKPIILSMARMDRIKNLSGLAELYGRSSRLRSLANLVIIGGHVDVQNSMDAEEREEIRRMHEIMDHYQLDGQMRWVGSQLDKTVVGELYRVVADGRGVFVQPALFEAFGLTVIEAMSSGLPVFATRHGGPLEIIEDGVSGFHIDPNDPEATAEKLADFLEAARERPKYWEEISDAALARVSERYTWERYAERLATLARCAGFWRFVLSRESQVMERYLQMFRHLQWRPLAHAVPME

SEQ ID NO: 222 - protein, 793 aa, synthetic construct
MIEELRQQLLDSPRSWRAFLRHLVASQRDSWLHTDLQRACKTFREQPPEGYPEDIGWLADFVAHTQEAIFRDPWMVFAWRLRPGVWEYVRIHVEQLAVEELSTDEYLQAKEQLVGLGAEGEAVLTVDFEDFRPVSQRLKDESTIGDGLTHLNRHLAGRIWTDLAAGRSQILEFLGLHRLDNQNLMLSNGNTDFDSLRQTVQYLGTLPRETPWAEFREDMRRRGFEPGWGNTAGRVRETMRLLMDLLDSPSPAALESFLDRIPMISNVTIVSIHGWFAQDKVLGRPDTGGQVVYILDQARALEREMRNRLRQQGVDVEPRILIVTRLIPESDGTTCDQRLEPVHGAENVQILRVPFRYEDGRIHPHWISRFKVWPYLERFASDAEREIKAELGSRPDLIIGNYSDGNLVATLLSEKLGVTQCNIAHALEKSKYLYSDLHWPDHEQDHHFACQFTADLIAMNAADIIVTSTYQEIAGNDREVGQYESHQDYTLPGLYRVENGIDVFDSKFNIVSPGADPRTYFSYARTEERFSSLWPEIESLLFGREPGPDIRGVLEDRQKPIILSMARMDRIKNLSGLAELYGRSSRLRSLANLVIIGGHVDVQNSMDAEEREEIRRMHEIMDHYQLDGQMRWVGSQLDKTVVGELYRVVADGRGVFVQPALFEAFGLTVIEAMSSGLPVFATRHGGPLEIIEDGVSGFHIDPNDPEATAEKLADFLEAARERPKYWEEISDAALARVSERYTWERYAERLMTIARCFGFWRFVLSRESQVMERYLQMFRHLQWRPLAHAVPME

SEQ ID NO: 223 - protein, 793 aa, synthetic construct
MIEELRQQLLDSPRSWRAFLRHLVASQRDSWLHTDLQRACKTFREQPPEGYPEDIGWLADFVAHTQEAIFRDPWMVFAWRLRPGVWEYVRIHVEQLAVEELSTDEYLQAKEQLVGLGAEGEAVTTWDLEDLRPVSQRLKDESTIGDGLTHLNRHLAGRIWTDLAAGRSQILEFLGLHRLDNQNLMLSNGNTDFDSLRQTVQYLGTLPRETPWAEFREDMRRRGFEPGWGNTAGRVRETMRLLMDLLDSPSPAALESFLDRIPMISNVLIVSIHGWFAQDKVLGRPDTGGQVVYILDQARALEREMRNRLRQQGVDVEPRILIATRLIPESDGTTCDQRLEPVHGAENVQILRVPFRYEDGRIHPHWISRFKVWPYLERYASDLEREVKAELGSRPDLIIGNYSDGNLVATLLSEKLGVTQCNIAHALEKSKYLYSDLHWPDHEQDHHFACQFTADWIAMNAADIIVTSTYQEIAGNDREVGQYESHQDYTLPGLYRVENGVDVFDSKFNIVSPGADPRTYFSYARTEERFSSLWPEIESLLFGREPGPDIRGVLEDRQKPIILSMARMDRIKNLSGLAELYGRSSRLRSLANLVIIGGHVDVQNSMDAEEREEIRRMHEIMDHYQLDGQMRWVGSQLDKTVVGELYRVVADGRGVFVQPALFEAFGLTVIEAMSSGLPVFATRHGGPLEIIEDGVSGFHIDPNDPEATAEKLADFLEAARERPKYWEEISDAALARVSERYTWERYAERLMTIARCFGFWRFVLSRESQVMERYLQMIRHLQWRPLAHAVPME

SEQ ID NO: 224 - protein, 793 aa, synthetic construct
MIEVLRQQLLDHPRSWRAFLRHLVASQRGLWLHTDLQHACKTFREQPPEGYPEDSGPLADFIAHCQEAIFLDPWMVFAWRLRPGVWEYVRIHVEQLAVEELSVDEYLQAKEQLVDGGAEGEAVLTVDFEDFRPVSQRLKDESTIGDGLTHLNRHLAGRIWTDLAEGRSAILEFLRLHRLDGQNLMLSDRITDFDSLRQTLQYLGTLPPETPWAEFREDMRRMGFEPGWGNTAGRVRETMRLLMDLLDSPSPAALESFLDRIPMISNVLIVSIHGYFAQDNVLGRPDTGGQVVYILDQARALEREMRNRLRQQGVDVEPRILIATRLIPESDGTTCDQRLEPVHGAEHVWILRVPFRNEDGRIHPHWISRFKVWPYLERYAEDLEREVKAELGGRPDLIIGNYSDGNLVATILSEKLGVTQCNIAHALEKTKYPGSDLYWKKYEQDYHFACQFTADLIAMNAADIIVTSTYQEIAGNDREVGQYESHQDYTLPGLYRVENGIDVFDPKFNIVSPGADPSIYFSYSRKERRFSSLWPEIESLLFGREPGPDIRGVLEDPQKPIILSVARMDRIKNLSGLAELYGRSARLRSLANLVIIGGHVDVQASMDAEEREEIRRMHEIMDRYQLDGQMRWVGSHLDKRRVGELYRVVADGRGVFVQPALFEAFGLTVIEAMSSGLPVFATRHGGPLEIIEDGVSGFHIDPNDPEAVAEKLADFFEAAREDPKYWEEISQAALARVSERYTWERYAERLMTIARCFGFWRFVTSRESQVMERYLQMFRHLQWRPLAHAVPME

SEQ ID NO: 225 - protein, 793 aa, synthetic construct
MIEVLRQQLLDHPNAWYAFLRHLVASQRGLWLHTDLQHACKTFREQPPEGYLEDSGPLADFIAHCQEAIFLDPWMVFAWRLRPGVWEYVRIHVEQLAVEELSVDEYLQAKEQLVDGGAEGEAVLTVDFEDFRPVSQRLKDESTIGNGLTHLNRHLAGRIWTDLAEGRSALLEFLRLHRLDGQQLMLSDRITDFDSLRQTLQYLGTLPPETPWAEFREDMRRMGFEPGWGNTAGRVRETMRLLMDLLDSPSPAALEKFLDRIPMISNVLIVSIHGYFAQDNVLGRPDTGGQVVYILDQARALEREMRNRLRQQGVDVEPRILIATRLIPEADGTTCDQRLEPVHGAEHVWILRVPFRNEDGRILPHWISRFKVWPYLERYAEDLEREVKAELGGRPDLIIGNYSDGNLVATILSEKLGVTQCNIAHALEKTKYPGSDLYWKDYEQQYHFACQFTADLIAMNAADIIITSTYQEIAGNDREVGQYESHQDYTLPGLYRVENGIDVFDPKFNIVSPGADPSIYFSYSRKERRFSSLWPEIESLLFGREPGPDIRGVLEDPSKPIILSVARMDRIKNLSGLAELYGRSARLRSLANLVIIGGHVDVQASMDAEEREEIRRMHEIMDRYQLDGQMRWVGSHLDKRRVGELYRVVADTRGVFVQPALFEAFGLTVIEAMSSGLPVFATRHGGPLEIIEDGVSGFHIDPNDPEAVAEKLADFFEKAREDPKYWEEISQAALARVEERYTWERYAERLMTIARCFGFWKFVTSRESQVMERYLQMFRHLQWRPLAHAVPME

SEQ ID NO: 226 - protein, 793 aa, synthetic construct
MIEVLRQQLKDNPNSLYAFLRHYVASQRGIWLHHDLQHELKTFREQPPNGYPKDIGALAEFIKHCQEAIFLDPWMYFAWRLRPGVWEYVRIHVEQLVVEELSVDEYLQAKEELVDGGPEGEAVLTVDFEDFRRVSQRLKDESTIGNGLQHLNRHLAGRIWTDLKEGREALLEFLRLHRLDGQQLMLSDRIQDFDSLRQALQYLGTLPPDTPWSEFREEMRRRGFEPGWGDTAGRVRETMRLLMDLLDSPSPAALEKFLARIPMISNVLIVSIHGWFGQDNVLGRPDTGGQVVYILDQARALEREMRQRLKEQGVDVEPRILIATRLIPEADGTTCDQRLEPVHGTEHVHILRVPFRYEDGEIHPHWISRFKVWPYLERFAEDLEREVLAELGGRPDLIIGNYSDGNLVATLLSEKLGVTQCNIAHALEKTKYPGSDLYWRKYEEQYHFACQFTADLIAMNAADIIITSTYQEIAGNDREVGQYESHQAYTLPGLYRVVNGIDVFDPKFNIVSPGADPSIYFPYSRKEERLTSLHPEIEELLYGREPGPDHRGVLEDPSKPIIFSVARMDRIKNLSGLAEWYGRSPRLRSLANLVIIGGHVDVQKSMDREEREEIRRMHEIMDRYNLDGQMRWIGAHLDKRRVGELYRVVADRRGVFVQPALFEAFGLTVIEAMASGLPVFATRHGGPAEIIEDGVSGFHIDPNDPDAVAEKLADFFERAREDPKYWEEISQAALQRVEERYTWERYAERLMTIARVYGFWKFVSSRERQVTRRYLQMFRHLQWRPLAHAVPME

SEQ ID NO: 227 - protein, 793 aa, synthetic construct
MIEVLRQQLKDNPNSLRAFLRHYVASQRGIWLHTDLQHELKTFYEQPPNGYPEDIGALADFIRHCQEAIFLDPWMYFAWRLRPGVWEYVRIHVEQLAVEELSTDEYLQAKEELVDGGPEGEAVLTVDFEDFRRVSQRLKDESTIGNGLQHLNRHLAGRIWTDLKRGRSALLEFLRLHRLDGQQLMLSDRIQDFDSLRQAVQYLGTLPPETPWAEFREDMRRRGFEPGWGNTAGRVRETMRLLMDLLDSPSPAALEKFLARIPMISNVLIVSIHGWFAQDNVLGRPDTGGQVVYILDQARALEREMRERLRQQGVDVEPRILIATRLIPEADGTTCDQRLEPVHGTEHVHILRVPFRYEDGRIHPHWISRFKVWPYLERYARDLEREVLAELGGRPDLIIGNYSDGNLVATILSEKLGVTQCNIAHALEKTKYPGSDLYWRKYEEQYHFACQFTADLIAMNAADIIITSTYQEIAGNDREVGQYESHQAYTLPGLYRVVNGIDVFDPKFNIVSPGADPSIYFPYTRKEERFSSLHPEIEELLFGREPGPDHRGVLEDPSKPIILSVARMDRIKNLSGLAEWYGRSPRLRSLANLVIIGGHVDVQKSMDAEEREEIRRMHEIMDRYQLDGQMRWVGAHLDKRRVGELYRVVADRRGVFVQPALFEAFGLTVIEAMSSGLPVFATRHGGPLEIIEDGVSGFHIDPNDPDAVAEKLADFFERAREDPKYWEEISQAALQRVEERYTWERYAERLMTIARVYGFWRFVSSRERQVMRRYLQMFRHLQWRPLAHAVPME

SEQ ID NO: 228 - protein, 793 aa, synthetic construct
MIEVLRQQLLDSPRSWHAFLRHLVASQRGFWLHTDLQHACKTFREQPPEGYPEDIGPLADFIAHCQEAIFRDPWMVFAWRLRPGVWEYVRIHVEQLAVEELSVDEYLQAKEQLVGGGAEGEAVLTVDFEDFRPVSQRLKDESTIGNGLTHLNRHLAGRIWTDLAAGRSAILEFLRLHRLDGQQLMLSDRITDFDSLRQTLQYLGTLPRETPWAEFREDMRRRGFEPGWGNTAGRVRETMRLLMDLLDSPSPAALESFLARIPMISNVLIVSIHGWFAQDNVLGRPDTGGQVVYILDQARALEREMRRRLRQQGVDVEPRILIATRLIPESDGTTCDQRLEPVHGAENVWILRVPFRYEDGRIHPHWISRFKVWPYLERYARDLEREVKAELGGRPDLIIGNYSDGGLVATILSEKLGVTQCNIAHALEKTKYPGSDLYWPKYEQDHHFACQFTADLIAMNAADIIVTSTYQEIAGNDREVGQYESHQDYTLPGLYRVENGIDVFDPKFNIVSPGADPSIYFSYSRKERRFSSLWPEIESLLFGREPGPDIRGVLEDPQKPIILSVARMDRIKNLSGLAELYGRNPRLRSLANLVIIGGHVDVQASMDAEEREEIRRMHEIMDRYQLDGQMRWVGSHLDKRVVGELYRVVADKRGVFVQPALFEAFGLTVIEAMSSGLPVFATRHGGPLEIIEDGVSGFHIDPNDPEAVAEKLADFFEAARERPKYWEEISQAALARVSERYTWERYAERLMTIARVFGFWRFVSSRERQVMERYLQMFRHLQWRPLAHAVPME

SEQ ID NO: 229 - protein, 793 aa, synthetic construct
MIEVLRQQLLDHPRSWRAFLRHLVASQRGLWLHTDLQHECETFREQPPEGYPEDIGWLADFIAHCQEAIFLDPWMYFAWRLRPGVWEYVRIHVEQLAVEELSTDEYLQAKEQLVGGGAEGEAVLTVDFEDFRPVSQRLKDESTIGDGLTHLNRHLAGRIWGDLAEGRSAILEFLRLHRLDGQNLMLSDRITDFDSLRQALQYLGTLPPETPWAEFREDMRRRGFEPGWGNTAQRVRETMRLLMDLLDSPSPAALESFLDRIPMISNVLIVSIHGWFAQDNVLGRPDTGGQVVYILDQARALEREMRNRLRQQGVDVEPRILIATRLIPEADGTTCDQRLEPVHGTENVWILRVPFRYEDGRIHPHWISRFKVWPYLERYARDLEREVKAELGGRPDLIIGNYSDGNLVATILSEKLGVTQCNIAHALEKTKYPGSDLHWPKYEQDYHFACQFTADLIAMNAADIIVTSTYQEIAGNDREVGQYESHQDYTLPGLYRVENGIDVFDPKFNIVSPGADPSIYFSYSRKEERFSSLWPEIESLLFGREPGPDIRGVLEDPSKPIILSVARMDRIKNLSGLAELYGRSARLRSLANLVIIGGHVDVQASMDAEEREEIRRMHEIMDRYQLDGQMRWVGSHLDKRVVGELYRYVADGRGVFVQPALFEAFGLTVIEAMSSGLPVFATRHGGPLEIIEDGVSGFHIDPNDPEAVAEKLADFLERARERPKYWEEISQAALARVSERYTWERYAERLMTIARVFGFWRFVSSRESQVMERYLQMFRHLQWRPLAHAVPME

SEQ ID NO: 230 - protein, 793 aa, synthetic construct
MIEVLRQQLLDHPRSWRAFLRHLVASQRGMWLHTDLQHECKTFREQPPEGYPEDIGPLADFIAHCQEAIFRDPWMVFAWRLRPGVWEYVRIHVEQLAVEELSVDEYLQAKEQLVGGGAEGEAVLTVDFEDFRPVSQRLKDESTIGDGLTHLNRHLAGRIWTDLAAGRSAILEFLRLHRLDGQQLMLSDRITDFDSLRQAVQYLGTLPRETPWAEFREDMRRRGFEPGWGNTAGRVRETMRLLMDLLDSPSPAALESFLDRIPMISNVLIVSIHGWFAQDNVLGRPDTGGQVVYILDQARALEREMRNRLRQQGVDVEPRILIATRLIPESDGTTCDQRLEPVHGTENVWILRVPFRYEDGRIHPHWISRFKVWPYLERYARDLEREVKAELGGRPDLIIGNYSDGNLVATILSEKLGVTQCNIAHALEKSKYPGSDLYWKKYEQDYHFACQFTADLIAMNAADIIVTSTYQEIAGNDREVGQYESHQDYTLPGLYRVENGIDVFDSKFNIVSPGADPSIYFSYSRHEERFSSLWPEIESLLFGREPGPDIRGVLEDPQKPIILSVARMDRIKNLSGLAEWYGRSARLRSLANLVIIGGHVDVQASMDAEEREEIRRMHEIMDRYQLDGQMRWVGSHLDKRRVGELYRVVADQRGVFVQPALFEAFGLTVIEAMSSGLPVFATRHGGPLEIIEDGVSGFHIDPNDPEAVAEKLADFFERARERPKYWEEISQAALARVSERYTWERYAERLMTIARCFGFWRFVSSRERQVMERYLQMFRHLQWRPLAHAVPME

SEQ ID NO: 231 - protein, 793 aa, synthetic construct
MIEVLRQQLLDHPREWRAFLRHYVASQRGLWLHHDLQHECETFREEPPEGYPEDQGPFAEFVKHCQEAIFLDPWMVFAWRLRPGVWEYVRIHVEQLAVEELSVDEYLQAKEELVDGGAEGEAVLEVDFEDFNRTSQRLKDESTIGNGLQHLNRHLAGRIWTDLKEGRSALLEFLRLHRLDGQQLMLSDRIQDFDSLRQALQYLGTLPPDTPWSEFEEDMRRRGFEPGWGDTAGRVRETMRLLMDLLDSPSPAALEKFLDRIPMISNVLIVSIHGWFAQDNVLGRPDTGGQVVYILDQARALEREMRKRLKQQGVDVEPRILIATRLIPEADGTTCDQRLEPVHGTEHVWILRVPFRYENGRIHPHWISRFKVWPYLERFARDLEREVLAELGGRPDLIIGNYSDGNLVATLLSEKLGVTQCNIAHALEKTKYPGSDLYWKKYEEQYHFACQFTADLIAMNAADIIITSTYQEIAGTDDEVGQYESHQDYTLPGLYRVVNGIDVFDPKFNIVSPGADPSIYFPYSRKEERLSSLHPEIEELLYGREPGPDHRGVLEDPSKPIILSVARMDRIKNLSGLAEWYGRNPRLRSLANLVIIGGHVDVQKSNDREEREEIRRMHEIMDRYNLDGQMRWVGAHLDKRRVGELYRVVADRRGVFVQPALFEAFGLTVIEAMASGLPVFATRHGGPLEIIEDGVSGFHIDPNDPDAVAEKLADFFERARERPKYWEKISQAALRRVEERYTWELYAERLMTIARVYGFWRFVSSRERQVTRRYLQMFRHLQWRPLAHAVPME

SEQ ID NO: 232 - protein, 793 aa, synthetic construct
MIEVLRQQLLDHPREWRAFLRHLVASQRGLWLHHDLQHECKTFREEPPEGYPEDQGPLADFIAHCQEAIFLDPWMVFAWRLRPGVWEYVRIHVEQLAVEELSVDEYLQAKEQLVNGGAEGEAVLTVDFEDFRRVSQRLKDESTIGDGLEHLNRHLAGRIWTDLKEGRSAILEFLRLHRLDGQNLMLSDRITDFDSLRQTLQYLGTLPPETPWAEFREDMRRRGFEPGWGNTAGRVRETMRLLMDLLDSPSPAALEKFLDRIPMISNVLIVSIHGWFAQDNVLGRPDTGGQVVYILDQARALEREMRNRLRQQGVDVEPRILIATRLIPEADGTTCDQRLEPVHGTEHVWILRVPFRYEDGRIHPHWISRFKVWPYLERYARDLEREVKAELGGRPDLIIGNYSDGNLVATILSEKLGVTQCNIAHALEKTKYPGSDLYWKKYEQQYHFACQFTADLIAMNAADIIITSTYQEIAGNDDEVGQYESHQDYTLPGLYRVVNGIDVFDPKFNIVSPGADPSIYFPYSRKEERFSSLWPEIESLLFGREPGPDHRGVLEDPDKPIILSVARMDRIKNLSGLAEWYGRNPRLRSLANLVIIGGHVDVQKSMDAEEREEIRRMHEIMDRYQLDGQMRWVGSHLDKRRVGELYRVVADRRGVFVQPALFEAFGLTVIEAMSSGLPVFATRHGGPLEIIEDGVSGFHIDPNDPEAVAEKLADFFEKARERPKYWEEISQAALARVSERYTWERYAERLMTIARVFGFWRFVTSRERQVMRRYLQMFRHLQWRPLAHAVPME

SEQ ID NO: 233 - protein, 793 aa, synthetic construct
MIEVLRQQLLDHPNAWRAFLRHYVASQRGLWLHHDLQHELEADREQPPEGYPKDNGPLAEFIKHCQEAIFIDPWMVFAWRLRPGVWEYVRIHVEQLAVEELSVDEYLQFKEQLVNGGAEGEAVLTVDFEDFRRSSQRLKDESTIGNGVQHLNRHLAGRIWGDLKEGRERLLEFLRLHRHDGQQLMLSDRIQDFDSLRQALQYLGTLPRDTPWSEFEEEMRRLGFEPGWGDTAERVRETMRLLMDLLDSPSPATLEKFLDRIPMISNVLIVSIHGWFAQDNVLGRPDTGGQVVYILDQARALEREMRDRLRQQGVDVEPRILIATRLIPESDGTTCDQRLEPVHGTEHVHILRVPFRYEDGRIHPHWISRFKVWPYLERFARDLEREVLAELGGRPDLIIGNYSDGNLVATILSEKLGVTQCNIAHALEKTKYPGSDLYWKKYEEQYHFACQFTADLIAMNAADIIITSTYQEIAGTDNEVGQYESHQDYTLPGLYRVVHGIDVFDPKFNIVSPGADPSIYFPYSRKERRFSSLHPEIEELLFGREPGPDIRGVLEDPSKPIILSVARMDRIKNLSGLAEWYGRSARLRELANLVIIGGHIDVEKSNDREEREEIRRMHEIMDRYQLDGQMRWIGSHLDKRVVGELYRYVADRRGVFVQPALFEAFGLTVIEAMASGLPVFATRHGGPLEIIEDGVSGFHIDPNDPDAVAEKLADFFERAREDPDYWEEISQAALQRVEERYTWERYAERLMTLARCYGFWRFVTKRERQVTRRYLQMFRHLQWRPLAHAVPME

SEQ ID NO: 234 - protein, 793 aa, synthetic construct
MIEVLRQQLSDHPNSWRAFLRHLVASQRDFWLHTDLQDACKTFREQPPEGYPEDIGWLADFIAHCQEAIFRDPWMVFAWRLRPGVWEYVRIHVEQLAVEELSTDEYLQFKEQLVGGGAEGEAVLTVDFEDFRPVSQRLKDESTIGDGLTHLNRHLAGRLWTDLGKGRSAILEFLGLHRLDGQNLMLSDRNTDFDSLRQTLQYLGTLPRDTPWAEFREDMRRLGFEPGWGDTAGRVRETMRLLMDLLDSPSPAALESFLGRIPMISNVLIVSIHGWFAQDNVLGRPDTGGQVVYILDQARALEREMRNRLRQQGVDVEPRILIATRLIPESDGTTCDQRLEPVHGTENVQILRVPFRYEDGRIHPHWISRFKVWPYLERYARDLEREVKAELGGRPDLIIGNYSDGNLVATILSEKLGVTQCNIAHALEKSKYPGSDLYWPKYEQQYHFACQFTADLIAMNAADIIVTSTYQEIAGNDREVGQYESHQDYTLPGLYRVVNGIDVFDSKFNIVSPGADPSVYFPYTRHEKRFSSLWPEIESLLFGREPGPDHRGVLEDPQKPIILSVARMDRIKNLSGLAEWYGRSNRLRSLANLVIIGGHVDVQKSMDGEEREEIRRMHEIMDRYQLDGQMRWVGSHLDKNRVGELYRVVADGRGVFVQPALFEAFGLTVIEAMSSGLPVFATRHGGPLEIIEDGVSGFHIDPNHPEAVAEKLADFLEAARERPKYWEKISQAALARVSERYTWERYAERLMTIARCFGFWRFVLSRESQVMERYLQMFRHLQWRPLAHAVPME

SEQ ID NO: 235 - protein, 793 aa, synthetic construct
MIEVLRQQLSDHPNSWRAFLRHLVASQRDIWLHHDLQDACKTFREQPPEGYPEDIGPLADFIAHCQEAIFRDPWMVFAWRLRPGVWYYVRIHVEQLAVEELSTDEYLQFKEQLVGLGAEGEAVLTVDFEDFRPGFQRLKDESTIGNGLEHLNRHLAGRMWTDLAAGDSALLEFLGLHRLDGQQLMLSDGNTDFDSLRQTVQYLGTLPPETPWAEFREDMRRRGFEPGWGRTAGRVRETMRLLMDLLDSPSPAALESFLDRIPMISNVLIVSIHGWFAQDNVLGRPDTGGQVVYILDQARALEREMRNRLRQQGVDVEPRILIATRLIPESDGTTCDQRLEPVHGTENVWILRVPFRYEDGRIHPHWISRFKVWPYLERYARDLEREVLAELGGRPDLIIGNYSDGNLVATILSQKLGVTQCNIAHALEKSKYPGSDLHWPLYEQDYHFACQFTADLIAMNAADIIVTSTYQEIAGNDREVGQYESHQDYTLPGLYRVVNGIDVFDPKFNIVSPGADPSIYFPYTRHEERFSSLHPEIESLLFGREPGPPIRGVLEDPDKPIILSVARLDRIKNLSGLAELYGRSARLRELANLVIIGGHVDVQASMDAEEREEIRRMHEIMDRYQLDGQMRWVGSHLDKRVVGELYRYVADKRGAFVQPALFEAFGLTVIEAMSSGLPVFATRHGGPLEIIEDGVSGFHIDPNDPEAVAEKIADFLEAARERPKYWEEISQAALARVEERYTWERYAERLMTLARVYGFWRFVLSRESQVMRRYLQMFRHLQWRPLAHAVPME

SEQ ID NO: 236 - protein, 793 aa, synthetic construct
MIEVLRQQLLDNPNEWRAFLRHLVASQRGSWLHHDLWDACKTFREQPPEGYPEDIGWLAEFIAHCQEAIFRDPWFVFAWRLRPGVWEYVRIHVEQLAVEELSTDEYLQFKEQLVTGGAEGEAVLEVDFEDFRPGFQRLKDESTIGDGLTHLNRHLAGRIWTDLGAGRSAILEFLSLHRLDGQQLMLNNRITDFDSLRQALQYLGTLPRDTPWSEFREDMRRMGFEPGWGDTAGRVRETMRLLMDLLDSPSPAALEKFLDRIPMISNVLIVSIHGWFGQDNVLGRPDTGGQVVYILDQARALEREMRNRLRQQGVDVEPRILIATRLIPESRGTTCDQRLEPVHGAENVHILRVPFRYEDGRIHPHWISRFKVWPYLERYARDLEREVKAELGGRPDLIIGNYSDGNLVATILSEKLGVTQCNIAHALEKSKYPGSDLYWPKYEQKYHFACQFTADLIAMNAADIIVTSTYQEIAGNDREVGQYESHQAYTLPGLYRVVNGIDVFDPKFNIVSPGADPSIYFSYTRTEKRFSSLHPEIERLLFGREPGPPIRGVLEDPDKPIILSVARMDRIKNLSGLAEWYGRSARLRELANLVIIGGHVDVQKSSDGEEQEEIRRMHEIMDRYQLDGQMRWVGSHLDKRVVGELYRYVADRRGVFVQPALFEAFGLTVIEAMSSGLPVFATRHGGPLEIIEDGVSGFHIDPNHPDAVAEKLADFLEAAREDPKYWEKISQAALQRVEERYTWERYAERLMTIARVYGFWKFVLKRERQVMRRYLQMFRHLQWRPLAHAVPME

SEQ ID NO: 237 - protein, 793 aa, synthetic construct
MIEVLRQQLSDHPNSWRAFLRHLVASQRDSWLHTDLQDAFDTFREQPPEGYPEDIGPLAEFIAHCQEAIFRDPWMVFAWRLRPGVWEYYRIHVEQLAVEELSTSEYLQFKEELVGGGAEGEAVLTVDFEDFRPGSQRLKDESTIGDGLEHLNRHLAGRIWTDLGKGDYAILEFLGLHRLDGQQLMLSDRFTDFDSLRQTLQYLGKLPRDTPWAEFREDLQRLGFEPGWGDTAERVRETMRLLMDLLDSPSPAALEKFLARIPMISNVLIVSIHGWFAQDNVLGRPDTGGQVVYILDQARALEREMRERLRQQGVDVEPRILIATRLIPEADGTTCDQRLEPVHGAEHVWILRVPFRYEDGRIHPHWISRFKVWPYLERYARDLEREVKAELGGRPDLIIGNYSDGNLVATILSEKLGVTQCNIAHALEKSKYPGSDLHWKRYEQQYHFACQFTADLIAMNAADIIVTSTYQEIAGNDHEVGQYESYQDYTLPGLYRVVNGIDVFDPKFNIVSPGADPSIYFSYSETEKRLTSLHPEIEKLLFGPDPGPDHRGVLEDPDKPIILSVARLDRIKNLSGLAEWYGRNARLRELANLVIIGGHVDVQKSTDGEEREEIKRMHEIMDKYQLDGQMRWVGSHLDKNRVGELYRYVADGRGVFVQPALFEAFGLTVIEAMSSGLPVFATRHGGPLEIIEDGVSGFHIDPNHGEAVAEKLADFLEKARERPKYWEKISQAALQRVEERYTWERYAERLMTIARVFGFWRFVTKRESQVMERYLQMFRHLQWRPLAHAVPME

SEQ ID NO: 238 - protein, 793 aa, synthetic construct
MIEVLRQQLLDNPNSWRAFLRHLVASGRDLWLHTDLQDACETFREQPPEGYPEDIGWFADFIAHCQEAIFRDPWMVFAWRLRPGVWEYVRIHVEQLAVEELSTDEYLQAKEQLVGLGAEGEAVLTVDFEDFRPVSQRLKDESTIGDGLEHLNRHLAGRIWTDLAAGRSKILEFLGLHRLDGQQLMLSDRITDFDSLRQTVQYLGTLPEETPWAEFREDMRRRGFEPGWGDTAGRVRETMRLLMDLLDSPSPAALEKFLGRIPMISNVLIVSIHGWFAQDNVLGRPDTGGQVVYILDQARALEREMRNRLRQQGVDVEPRILIATRLIPESDGTTCDQRLEPVHGTENVWILRVPFRYEDGRIHPHWISRFKVWPYLERYARDLEREVLAELGGRPDLIIGNYSDGNLVATILSEKLGVTQCNIAHALEKSKYPGSDLYWPKYEQKYHFACQFTADLIAMNAADIIVTSTYQEIAGNDREVGQYESHQDYTLPGLYRVVNGIDVFDPKFNIVSPGADPSIYFSYTRTEERFSSLHPEIEELLFGREPGPDIRGVLEDPQKPIILSVARMDRIKNLTGLAELYGRSARLRELANLVIIGGHVDVQKSTDAEEREEIRRMHEIMDRYQLDGQMRWVGSHLDKRVVGELYRYVADGRGVFVQPALFEAFGLTVIEAMSSGLPVFATRHGGPLEIIEDGVSGFHIDPNDPEAVAEKLADFLEAARERPKYWEKISQAALQRVEERYTWERYAERLMTIARCYGFWRFVLSRESQVMRRYLQMFRHLQWRPLAHAVPME

SEQ ID NO: 239 - protein, 793 aa, synthetic construct
MIEVLRQQLSDHPNAWHAFLRHLVASQRGIWQHHDLQDALEDFREQPPEGYPEGIGALARFIEHCQEAIFRDPWMVFAWRLRPGVWEYVRIHVEQLTVEELSTDEYLQFKEQLVGGGPEGEAVLEVDFEDFNRGFQRMKDESTIGNGLQHLNRHLAGRLWTDLAGGRSKLLEFLGVHRLDGQQLMLSDRITDFDSLRQALQYLGTLPDDTPWSEFEEDMQRMGFEPGWGDTAGRVRETMRLLMDLLDSPSPAALEKFLARIPMISNVLIVSIHGWFAQDNVLGRPDTGGQVVYILDQARALEREMRERLRQQGVDVEPRILIATRLIPDSDGTTCDQRLEPVHGAENVWILRVPFRYEDGEIHPHWISRFKVWPYLERYAEDLEREVLAELGGRPDLIIGNYSDGNLVASLLSEKLGVTQCNIAHALEKSKYPGSDLYWPKYEQKYHFACQFTADLIAMNAADIIVTSTYQEIAGNDHSVGQYESYQAFTLPGLYRVVHGIDVFDPKFNIVSPGADPSIYFSYSRTEERLTSLHPEIEKLLFGREPGPDIRGVLEDPDKPIILSVARMDRIKNLTGLAEWYGRNPRLRELANLVIIGGHVDVQKSTDREEREEIRRMHEIMDRYQLDGQMRWIGSHLDKRVVGELYRYVADTRGVFVQPALFEAFGLTVIEAMASGLPVFATRHGGPLEIIEHGVSGFHIDPNHPDAVAEKLADFLEAARNDPKYWEEISQAALKRVYERYTWERYAERLMTIARVYGFWRFVSSRERQVTERYLQMFRHLQWRPLAHAVPME

SEQ ID NO: 240 - protein, 793 aa, synthetic construct
MIEVLRQQLLDHPEEWRAFLRHLVASQRDFWLHHDLQDAFETFREQPPEGYPEDIGPLADFIAHCQEAIFRDPWMYFAWRLRPGVWEYVRIHVEQLAVEELSVDEYLQFKEQLVSGGAEGEAVLTVDFEDFRPGFQRLKDESTIGNGLQHLNRHLAGRIWHDLAKGRSAILEFLSLHRLDGQQLMLSDRITDFDSLRQTLQYLGTLPRETPWAEFREDMRRLGFEPGWGDTAGRVRETMRLLMDLLDSPSPAALEKFLARIPMISNVLIVSIHGWFAQDNVLGRPDTGGQVVYILDQARALEREMRERLRQQGVDVEPRILIATRLIPESDGTTCDQRLEPVHGAENVWILRVPFRYEDGRIHPHWISRFKVWPYLERYAEDLEREVLAELGGRPDLIIGNYSDGNLVATLLSEKLGVTQCNIAHALEKTKYPGSDLYWPKYEDQYHFACQFTADLIAMNAADIIVTSTYQEIAGNDREVGQYESHQAYTLPGLYRVVNGIDVFDSKFNIVSPGADPSVYFSYSRTERRFSSLHPEIERLLFGREPGPDIRGVLEDPDKPIILSVARMDRIKNLSGLAEWYGRSPRLRELANLVIIGGHVDVENSSDSEEREEIRRMHEIMDRYQLDGQMRWVGSHLDKRVVGELYRVVADTRGVFVQPALFEAFGLTVIEAMSSGLPVFATRHGGPLEIIEDGVSGFHIDPNHPEAVAEKLADFFERARERPKYWEEISQAALKRVEERYTWERYAERLMTLARVYGFWRFVSSRESQVMERYLQMFRHLQWRPLAHAVPME

SEQ ID NO: 241 - protein, 793 aa, synthetic construct
MIEVLRQQLLQHPDSWRAFLRHLVASGRDFWLHHDLQDAFKTFREQPPEGYPEDIGVLADFIAHCQEAIFRDPWMVFAWRLRPGVWEYVRIHVEQLAVEELSTDEYLQFKEQLVNGGAEGEAVLTVDFEDFRPGFQRLKDESTIGNGLEHLNRHLAGRLWTDLGKGRSRLLEFLGLHRHDGQNLMLSNGNTDFDSLRQTVQYLGTLPRETPWAEFREDMRRMGFEPGWGDTAERVRETMRLLMDLLDSPSPAALESFLARIPMISNVLIVSPHGWFAQDKVLGRPDTGGQVVYILDQARALEREMRERLRQQGVDVEPRILIATRLIPESDGTTCDQRLEPVHGTENVHILRVPFRYEDGRIHPHWISRFKVWPYLERYARDLEREVLAELGGRPDLIIGNYSDGNLVATLLSEKLGVTQCNIAHALEKSKYPDSDLYWPKYEQDYHFACQFTADLIAMNAADIIITSTYQEIAGTDREVGQYESHQDYTLPGLYRVVNGIDVFDPKFNIVSPGADPSVYFPYSRHEERFSSLWPEIESLLFGREPGPDIRGVLSDPQKPIILSVARMDRIKNLTGLAEWYGRSPRLRELANLVIVGGHVDVQASNDAEEREEIRRMHEIMDRYQLDGQVRWLGSHLDKRRVGELYRYVADKRGVFVQPALFEAFGLTVIEAMSSGLPVFATRHGGPLEIIEHGVSGFHIDPNDPEAVAEKLADFLEAAREEPKYWEEISQAALARVEERYTWERYAERLMTLARVYGFWRFVLSRERQVTRRYLQMFRHLQWRPLAHAVPME

SEQ ID NO: 242 - protein, 793 aa, synthetic construct
MIEELRQQLLDHPNSWYAFLRHLVASQRGIWLHTDLQRECKTFREQPPEGYPEDIGWLADFVAHTQEAIFLDPWMVFAWRLRPGVWEYVRIHVEQLAVEELSTDEYLQAKEQLVGGGAEGEAVLTVDFEDFRPVSQRLKDESTIGDGLTHLNRHLAGRIWTDLAQGRSQILEFLRLHRLDGQQLMLSNRITDFDSLRQTVQYLGTLPRETPWAEFREDMRRRGFEPGWGNTAGRVRETMRLLMDLLDSPSPAALEKFLDRIPMISNVLIVSIHGYFAQDNVLGRPDTGGQVVYILDQARALEREMRNRLRQQGVDVEPRILIATRLIPESDGTTCDQRLEPVHGAENVQILRVPFRYEDGRIHPHWISRFKVWPYLERYAEDLEREVKAELGGRPDLIIGNYSDGNLVATLLSEKLGVTQCNIAHALEKSKYLYSDLHWPDHEQDYHFACQFTADLIAMNAADIIVTSTYQEIAGNDREVGQYESHQDYTLPGLYRVENGIDVFDSKFNIVSPGADPRIYFPYSRTEERFSSLWPEIESLLFGREPGPDIRGVLEDRSKPIILSMARLDRIKNLSGLAEWYGRSSRLRSLANLVIIGGHVDVQNSMDAEEREEIRRMHEIMDEYQLDGQMRWVGSQLDKTRVGELYRVVADRRGVFVQPALFEAFGLTVIEAMSSGLPVFATRHGGPLEIIEDGVSGFHIDPNDPEATAEKLADFLERARERPKYWEEISDAALARVSERYTWERYAERLMTIARCFGFWRFVSSRERQVMERYLQMFRHLQWRPLAHAVPME

SEQ ID NO: 243 - protein, 793 aa, synthetic construct
MIEELRQQLRDHPNSWYAFLRHLVASQRGIWLHTDLQRECKTFREPPPEGYPEDIGWLADFVAHTQEAIFLDPWMYFAWRLRPGVWEYVRIHVEQLAVEELSVEEYLQAKEELVDGGAEGEAVLTVDFEDFRPVSQRLKDESTIGNGLEHLNRHLAGRIWTDLAQGRSQLLEFLRLHRLDGQQLMLSDRITDFDSLRQAVQYLGTLPRDTPWSEFREDMRRRGFEPGWGDTAGRVRETMRLLMDLLDSPSPAALEKFLDRIPMISNVLIVSIHGYFAQDNVLGRPDTGGQVVYILDQARALEREMRERLRQQGVDVEPRILIATRLIPEADGTTCDQRLEPVSGAEYVQILRVPFRYEDGEIHPHWISRFKVWPYLERYAEDLEREVLAELGGRPDLIIGNYSDGNLVATLLSEKLGVTQCNIAHALEKTKYLYSDLYWKDHEQQYHFACQFTADLIAMNAADIIITSTYQEIAGNDNEVGQYESHQDYTLPGLYRVEHGIDVFDPKFNIVSPGADPRIYFPYSRTERRFSSLWPEIERLLFGREPGPDIRGVLEDRSKPIILSMARLDRIKNLSGLAEWYGRSSRLRSLANLVIIGGHVDVQNSMDAEEREEIRRMHEIMDEYQLDGQMRWIGSQLDKTRVGELYRVVADRRGVFVQPALFEAFGLTVIEAMSSGLPVFATRHGGPLEIIEDGVSGFHIDPNDPDATAEKLADFFERAREDPKYWEEISQAALQRVYERYTWERYAERLMTIARCFGFWRYVSKRERQVMRRYLQMFRHLQWRPLAHAVPME

SEQ ID NO: 244 - protein, 793 aa, synthetic construct
MIEELRQQLLDHPREWYAFLRHYVASQRGMWLHHDLQHEFKAFREQPPEGYPEDIGWLAEFVQHTQEAIFRDPWMVFAWRERPGVWEYVRIHVEQLAVEELSVSEYLQAKEELVDGGAEGEAVLEVDFEDFRRNSQRLKDESTIGNGLQHLNRHLAGRLWTDLARGLEQLLDFLRLHRLDGQQLMLSDRIQDFDSLRQALQYLGTLPPDTPWSEFEEDMQRLGFEPGWGDTAGRVRETMRLLMDLLDSPSPAALEKFLDRIPMISNVLIVSIHGYFAQDNVLGRPDTGGQVVYILDQARALEREMRERLRQQGVDVEPRILIATRLIPEADGTTCDQRLEPVSGTEHVHILRVPFRYEDGRIHPHWISRFKVWPYLERFAEDLEREVLAELGGRPDLIIGNYSDGNLVATLLSEKLGVTQCNIAHALEKTKYLYSDLYWKDFEDQYHFACQFTADLIAMNAADIIVTSTYQEIAGTDNEVGQYESHQAYTLPGLYRVVNGIDVFDPKFNIVSPGADPRIYFSYTRKERRFSSLHPEIERLLYGREPGPEIRGVLEDRSKPIILTMARMDRIKNLTGLAEWYGRSSRLRELANLVIIGGHIDVGKSNDREEREEIRRMHEIMDEYNLDGQMRWIGAQLDKTRVGELYRVVADTRGVFVQPALFEAFGLTVIEAMASGLPVFATRHGGPLEIIEDGVSGFHIDPNDPDAAAEKLADFFERAREDPKYWEEISQAALQRVEERYTWERYAERLMTLARVYGFWRFVSKRERQVTRRYLQMFRHLQWRPLAHAVPME

SEQ ID NO: 245 - protein, 793 aa, synthetic construct
MIEELRQQLSDSRNSWRAFLRRYVASQRGLWLHTQLWDELKTFREQPPEGYPYDKGWLAKFLRHTQEAIFRDPWMVFAWRERPGVWEYVRIHVEQLAVEELSVDEYLQAKEELVDGGAEGEAVLEVDFEDFRRTSQRLKDESTIGNGLQHLNRHLAGRLWTDLGAGREQILEFLRLHRLDGQQLMLSDRIQDFDSLRQALQYLGTLPRDTPWSEFEEEMRRLGFEPGWGDTAGRVRETMRLLMDLLDSPSPAALEKFLARIPMISNVLIVSIHGWFGQDNVLGRPDTGGQVVYILDQARALEREMRERLRQQGVDVEPRILIATRLIPEAKGTTCDQRLEPVSGTEHTHILRVPFRKEDGRIHPHWISRFKVWPYLERYAEDLEREVLAELGGRPDLIIGNYSDGNLVATLLSEKLGVTQCNIAHALEKTKYLYSDLYWKDHEDQYHFACQFTADLIAMNAADIIITSTYQEIAGTDNEVGQYESHQDYTLPGLYRVVHGIDVFDPKFNIVSPGADPRIYFPYSRKERRFSSLHPEIEELLFGREPGPEIRGVLEDRSKPIILSMARMDRIKNLSGLAEWYGRSSRLRELANLVIIGGHVDVKKSGDREEREEIRRMHEIMDEYNLDGQMRWIGAQLDKTRVGELYRVVADTRGVFVQPALFEAFGLTVIEAMASGLPVFATRHGGPLEIIEDGVSGFHIDPNDPDAAAEKLADFFERAREDPKYWEEISQAALKRVEERYTWERYAERLMTIARVYGFWRFVLSRERQVTRRYLQMFRHLQWRPLAHAVPME

SEQ ID NO: 246 - protein, 793 aa, synthetic construct
MIEELRQQLLDHPNSWYAFLRHLVASQRGLWLHTDLQRECKTFREQPPEGYPETIGWLADFVAHTQEAIFRDPWMVFAWRLRPGVWEYVRIHVEQLAVEELSTDEYLQAKEQLVGGGAEGEAVLTVDFEDFRRHSQRLKDESTIGDGLTHLNRHLAGRIWTDLAAGRSQILEFLRLHRLDGQQLMLSDRITDFDSLRQTVQYLGTLPRETPWAEFREDMRRRGFEPGWGNTAGRVRETMRLLMDLLDSPSPAALESFLDRIPMISNVLIVSIHGWFAQDNVLGRPDTGGQVVYILDQARALEREMRNRLRQQGVDVEPRILIATRLIPESDGTTCDQRLEPVHGAENVHILRVPFRYEDGRIHPHWISRFKVWPYLERYAEDLEREVKAELGGRPDLIIGNYSDGNLVATLLSEKLGVTQCNIAHALEKSKYLYSDLHWKDHEQDYHFACQFTADLIAMNAADIIVTSTYQEIAGNDREVGQYESHQDYTLPGLYRVVNGIDVFDPKFNIVSPGADPRIYFPYSRTEERFSSLWPEIESLLFGREPGPDIRGVLEDRQKPIILSMARMDRIKNLSGLAEWYGRSSRLRSLANLVIIGGHVDVQNSSDAEEREEIRRMHEIMDEYQLDGQMRWVGSQLDKTRVGELYRVVADRRGVFVQPALFEAFGLTVIEAMSSGLPVFATRHGGPLEIIEDGVSGFHIDPNDPEATAEKLADFFEKARERPKYWEEISDAALARVSERYTWERYAERLMTIARVYGFWRFVTSRESQVMERYLQMFRHLQWRPLAHAVPME

SEQ ID NO: 247 - protein, 793 aa, synthetic construct
MIEELRQQLLDHPNSWYAFLRWYVASQRGLWLHHDLQRECKTFREQPPPGYPETIGWLAEFVKHTQEAIFRDPWMVFALRERPGVWEYVRIHVEQLAVEELSVDEYLQAKEELVDGGAEGEAVLTVDFEDFRRNSQRLKDESTIGNGLQHLNRHLAGRIWTDLAQGLEQILDFLRLHRLDGQQLMLSDRIQDFDSLRQAVQYLGTLPRDTPWSEFEEEMRRRGFEPGWGDTAGRVRETMRLLMDLLDSPSPAALEKFLDRIPMISNVLIVSIHGWFAQDNVLGRPDTGGQVVYILDQARALEREMRERLREQGVDVEPRILIATRLIPEADGTTCDQRLEPVSGAEHVHILRVPFRYEDGRIHPHWISRFKVWPYLERFAEDLEREVLAELGGRPDLIIGNYSDGNLVATLLSEKLGVTQCNIAHALEKTKYLYSDLYWRDFEDQYHFSCQFTADLIAMNAADIIVTSTYQEIAGNDNEVGQYESHQDYTLPGLYRVVHGIDVFDPKFNIVSPGADPRIYFPYSRKERRFSSLHPEIEELLFGREPGPDIRGVLEDRSKPIILSMARMDRIKNLSGLAEWYGRSSRLRELANLVIIGGHVDVQRSSDREEREEIRRMHEIMDEYNLDGQMRWIGSQLDKTRVGELYRVVADRRGVFVQPALFEAFGLTVIEAMASGLPVFATRHGGPLEIIEDGVSGFHIDPNDPDAAAEKMADFFERAREDPKYWEEISQAALQRVYERYTWERYAERLMTIARVYGFWRFVTKRERQVTERYLQMFRHLQWRPLAHAVPME

SEQ ID NO: 248 - protein, 793 aa, synthetic construct
MIEELRQQLLDHPRSWRAFLRHLVASGRDSWLHTDLQRACKTFREQPPEGYPEDIGPLADFVAHTQEAIFRDPWMYFAWRLRPGVWEYVRIHVEQLAVEELSTDEYLQFKEQLVGGGAEGEAVLTVDFEDFRPGFQRLKDESTIGDGLTHLNRHLAGRIWTDLGAGRSQILEFLGLHRLDGQQLMLSNGNTDFDSLRQTVQYLGTLPPETPWAEFREDMRRMGFEPGWGNTAERVRETMRLLMDLLDSPSPAALESFLARIPMISNVLIVSIHGWFAQDNVLGRPDTGGQVVYILDQARALEREMRNRLRQQGVDVEPRILIATRLIPESDGTTCDQRLEPVHGAENVQILRVPFRYEDGRIHPHWISRFKVWPYLERYAEDLEREVLAELGSRPDLIIGNYSDGNLVATLLSEKLGVTQCNIAHALEKSKYLYSDLHWKDHEQDYHFACQFTADLIAMNAADIIVTSTYQEIAGNDREVGQYESHQDYTLPGLYRVVNGIDVFDSKFNIVSPGADPSIYFSYSRTEERFSSLHPEIESLLFGREPGPDIRGVLEDRQKPIILSMARMDRIKNLTGLAELYGRSSRLRELANLVIIGGHVDVQNSMDAEEREEIRRMHEIMDHYQLDGQMRWVGSQLDKTVVGELYRVVADGRGVFVQPALFEAFGLTVIEAMSSGLPVFATRHGGPLEIIEDGVSGFHIDPNDPEATAEKLADFLEAARERPKYWEEISDAALARVSERYTWERYAERLMTIARVYGFWRFVLSRERQVMRRYLQMFRHLQWRPLAHAVPME

SEQ ID NO: 249 - protein, 793 aa, synthetic construct
MIEELRQQLTDHPNSWRAFLRHLVASGRDSWLHHDLQDACETFREQPPEGYPEDIGPLAEFVAHTQEAIFRDPWMYFAWRLRPGVWEYVRIHVEQLAVEELSTDEYLQFKERLVNGGAEGPAVLEVDFEDFRPGFQRLKDESTIGNGLQHLNRHLAGRIWTDLGRGREKILEFLGLHRLDGQQLMLSDRNQDFDSLRQAVQYLGTLPPDTPWSEFEEDMQRMGFEPGWGDTAERVRETMRLLMDLLDSPSPSALEEFLARIPMISNVLIVSIHGWFAQDNVLGRPDTGGQVVYILDQARALEREMRRRLREQGVDVEPRILIATRLIPESDGTTCDQRLEPVSGAENVWILRVPFRYENGRIHPHWISRFKVWPYLERFAEDLEREVLAELGGRPDLIIGNYSDGNLVATLLSEKLGVTQCNIAHALEKSKYPYSDLYWKDFEQQYHFACQFTADLIAMNAADIIITSTYQEIAGNDREVGQYESHQAYTLPGLYRVVNGIDVFDSKFNIVSPGADPSIYFSYSETERRFTSLHPEIEELLFGREPGPPHRGVLSDRDKPIILSMARMDRIKNLTGLAELYGRSPRLRELANLVIIGGHVDVKKSMDREEREEIRRMHEIMDKYNLDGQMRWIGSQLDKNRVGELYRYVADRRGVFVQPALFEAFGLTVIEAMSSGLPVFATRHGGPLEIIEDGVSGFHIDPNDPDAAAEKLADFLEAARERPTYWEKISQAALQRVRERYTWERYAERLMTLARVYGFWRYVSKRERQVTRRYLQMFRHLQWRPLAHAVPME

SEQ ID NO: 250 - protein, 793 aa, synthetic construct
MIEELRQQLLDSPNSWRAFLRHLVASGRDIWLHHDLQRACKDFREQPPEGYPEDISWLADFVAHTQEAIFRDPWFVFAWRLRPGVWEYVRIHVEQLVVEELSTDEYLQFKEQLVGGGAEGEAVLTVDFEDFRPGVQRLKDESTIGDGLTHLNRHLAGRMWTDLGAGRSKILEFLSLHRLDGQQLMLSNRNTDFDSLRQTLQYLGTLPRETPWAEFREDMRRRGFEPGWGRTAGRVRETMRLLMDLLDSPSPAALESFLGRIPMISNVLIVSIHGWFAQDNVLGRPDTGGQVVYILDQARALEREMRERLRQQGVDVEPRILIATRLIPESDGTTCDQRLEPVHGTENVWILRVPFRYEDGRIHPHWISRFKVWPYLERYAEDLEREVKAELGGRPDLIIGNYSDGNLVATLLSEKLGVTQCNIAHALEKSKYLYSDLHWKDHEQQYHFACQFTADLIAMNAADIIITSTYQEIAGNDREVGQYESYQDYTLPGLYRVVNGIDVFDSKFNIVSPGADPSIYFSYSRTEERFSSLHPEIEELLFGREPGPDIRGVLEDRDKPIILSMARMDRIKNLSGLAEWYGRSSRLRELANLVIIGGHVDVQNSMDAEEREEIRRMHEIMDEYQLDGQMRWVGSQLDKTRVGELYRYVADRRGVFVQPALFEAFGLTVIEAMSSGLPVFATRHGGPLEIIEHGVSGFHIDPNDPEATAEKLADFLEAARERPKYWEEISDAALARVEERYTWERYAERLMTIARCFGFWRFVSKRERQVTRRYLQMFRHLQWRPLAHAVPME

SEQ ID NO: 251 - protein, 793 aa, synthetic construct
MIEELRQQLLDHPNEWRAFLRHLVASGRPMWLHHDLWRACKDFREQPPEGYPEDIGWLEQFVRHTQEAIFRDPWMVFAWRLRPGVWEYVRIHVEQLAVEELSTDEYLQFKEQLVDGGAEGEAVLTVDFEDFRPGFQRLKDESTIGNGLEHLNRHLAGRMWTDLGQGRSQLLEFLRLHRLDGQQLMLSNRNTDFDSLRQAVQYLGTLPPDTPWAEFREDMRRRGFEPGWGDTAERVRETMRLLMDLLDSPSPAALEKFLARIPMISNVLIVSIHGWFAQDNVLGRPDTGGQVVYILDQARALEREMRERLRQQGVDVEPRILIATRLIPESDGTTCDQRLEPVSGTENVQILRVPFRYEDGNIHPHWISRFKVWPYLERYAEDLEREVLAELGGRPDLIIGNYSDGNLVATLLSEKLGVTQCNIAHALEKSKYLYSDLYWKDFEQQYHFACQFTADLIAMNAADIIITSTYQEIAGNDREVGQYESHQHYTLPGLYRVVNGIDVFDPKFNIVSPGADPRIYFSYSRTEKRFSSLHPEIEELLFGREPGPPHRGVLEDRDKPIILSMARLDRIKNLTGLAEWYGRSSRLRELANLVIIGGHVDVQNSTDREEREEMRRMHEIMDEYQLDGQMRWLGSQLDKTRVGELYRYVADTRGVFVQPALFEAFGLTVIEAMASGLPVFATRHGGPLEIIEDGVSGFHIDPNDPEAVAEKLADFLEAARERPKYWEKISDAALQRVRERYTWERYAERLMTLARVYGFWRFVSSRERQVTRRYLQMFRHLQWRPLAHAVPME

SEQ ID NO: 252 - protein, 793 aa, synthetic construct
MIEELRQQLHDHRNEWYAFLRHLVASGRGMWLHHDLWRACEDFREQPPEGYPEDIGWLEQFIRHTQEAIFRDPWMVFAWRLRPGVWEYVRIHVEQLVVEELSTDEYLQFKEQLVDGNAEGEAVLTVDFEDFRRGFQRLKDESTIGNGLEHLNRHLAGRMWQDLGQGRSQLLEFLRLHRLDGQQLMLSDRFQDFDSLRQALQYLGTLPPDTPWSEFREEMRRRGFEPGWGDTAERVRETMRLLMDLLDSPSPSALEKFLARIPMISNVLIVSIHGWFAQDNVLGRPDTGGQVVYILDQARALEREMRRRLREQGVDVEPRILIATRLIPEADGTTCDQRLEPVSGTENVQILRVPFRYEDGNIHPHWISRFKVWPYLERFAEDLEREVLAELGGRPDLIIGNYSDGNLVATLLSEKLGVTQCNIAHALEKSKYLYSDLYWKDFEDQYHFACQFTADLIAMNAADIIITSTYQEIAGNDREVGQYESHTHYTMPGLYRVVNGIDVFDPKFNIVSPGADPRIYFSYSRTEKRFSSLHPEIEELLFGREPGPPHRGVLEDRDKPIILSMARLDRIKNLTGLAEWYGRSSRLRELANLVIVGGHVDVANSTDREEREEIRRMHEIMDEYQLDGQMRWLGSQLDKTRVGELYRYVADKRGVFVQPALYEAFGLTVIEAMASGLPVFATRHGGPLEIIEDGVSGFHIDPNHPEQVAEKLADFLEAARERPTYWEKISQAALQRVRERYTWERYAERLMTLARVYGFWRYVSSRERQVTRRYLQMFRHLQWRPLAHAVPME

SEQ ID NO: 253 - protein, 793 aa, synthetic construct
MIEELRQQLLDHPDAWRAFLRHLVASQRDIWLHHDLQDACKTFREQPPEGYPEDIGWLADFVAHTQEAIFRDPWMYFAWRLRPGVWEYVRIHVEQLAVEELSTDEYLQFKEQLVDGGAEGEAVLTVDFEDFRPGFQRLKDESTIGNGLQHLNRHLAGRMWTDLGAGRSQILEFLGLHRLDGQNLMLSDRNTDFDSLRQAVQYLGTLPDETPWAEFREDMRRRGFEPGWGNTAGRVRETMRLLMDLLDSPSPAALESFLARIPMISNVLIVSIHGWFAQDNVLGRPDTGGQVVYILDQARALEREMRNRLRQQGVDVEPRILIATRLIPESDGTTCDQRLEPVHGTENVQILRVPFRYEDGRIHPHWISRFKVWPYLERFAEDLEREVKAELGGRPDLIIGNYSDGNLVATLLSEKLGVTQCNIAHALEKSKYLYSDLHWKDHEQQYHFACQFTADLIAMNAADIIITSTYQEIAGNDREVGQYESHQDYTLPGLYRVVNGIDVFDSKFNIVSPGADPRIYFSYTRTEERFSSLHPEIERLLFGREPGPDHRGVLEDRDKPIILSMARMDRIKNLTGLAEWYGRSSRLRELANLVIIGGHVDVQNSSDAEEREEIRRMHEIMDRYQLDGQMRWVGSQLDKTVVGELYRYVADRRGVFVQPALFEAFGLTVIEAMSSGLPVFATRHGGPLEIIEDGVSGFHIDPNDPEATAEKLADFLEAARERPKYWEEISDAALARVEERYTWERYAERLMTIARVYGFWRFVSSRERQVTRRYLQMFRHLQWRPLAHAVPME

SEQ ID NO: 254 - protein, 793 aa, synthetic construct
MIEELRQQLLDHPNTWRAFLRHLLASGRTMWLHHDLQRACKDFREQPPEGYPEDISALAEFVKHTQEAIVRDPWVYFAWRERPGVWEYVRIHIEQLVVEELSVSEYLQFKEQLVGGGAEGNAVLEVDFEDFRPGFQRLKDESTIGNGVEHLNRHLAGRMWQDLGKGDDKILDFLSLHRHRGQQLMLSDRISDFDSLRQALQYLGTLPEDTPWAEFEEDMRRMGFEPGWGRTAARVRETMRLLMDLLDSPSPSALEKFLGRIPMISNVLIVSIHGYFAQDNVLGRPDTGGQVVYILDQARALEREMRERLRQQGVDVEPRILIATRLIPEADGTTCDQRLEPVSGTENVHILRVPFRYEDGRIHPHWISRFRVWPYLERFAEDLEREVLAELGGRPDLIIGNYSDGNLVATLLSEKLGVTQCNIAHALEKSKYLYSDLHWKDFEQQYHFACQFTADLIAMNAADIIITSTYQEIAGNDHEVGQYESHQSYTMPGLYRVVNGIDVFDPKFNIVSPGADPRIYFSYSRTEERLTSLHPEIEELLFGREPGPDHRGVLSDRDKPIILSMARMDRIKNLTGLAEWYGRSSRLRELANLVIIGGHVDVQKSSDSEEREEIRRMHEIMDEYNLDGQMRWVGSQLDKVRVGELYRYVADTRGVFVQPALYEAFGLTVIEAMASGLPVFATRHGGPLEIIEDGVSGFHIDPNDPDAVAEKLADFLEAARERPKYWEKISQAALQRVRERYTWERYAERLMTIARVYGFWKYVSSRERQVMRRYLQMFRHLQWRPLAHAVPME

SEQ ID NO: 255 - protein, 793 aa, synthetic construct
MIEVLRQQLLDSPRSWRAFLRHLVASQRDSWLHTDLQHACKTFREQPPEGYPEDIGWLADFIAHCQEAIFRDPWVVFAWRLRPGVWEYVRIHVEQLAVEELSTDEYLQAKEQLVGLGAEGEAVLTVDFEDFRPVSQRLKDESTIGDGLTHLNRHLAGRIWTDLAAGRSAILEFLGLHRLDNQNLMLSNGNTDFDSLRQTVQYLGTLPRETPWAEFREDMRRRGFEPGWGNTAGRVRETMRLLMDLLDSPSPAALESFLDRIPMISNVLIVSPHGWFAQDKVLGRPDTGGQVVYILDQVRALEREMRNRLRQQGVDVEPRILIVTRLIPESDGTTCDQRLEPVHGAENVQILRVPFRYEDGRIHPHWISRFKVWPYLERFARDAEREVKAELGSRPDLIIGNYSDGGLVATILSEKLGVTQCNIAHALEKSKYPGSDLHWPLYEQDHHFACQFTADLIAMNAADFIVTSTYQEIAGNDREVGQYESHQDYTLPGLYRVENGIDVFDSKFNIVSPGADPSTYFSYARHEERFSSLWPEIESLLFGREPGPDIRGVLEDPQKPIILSVARMDRIKNLSGLAELYGRSARLRSLANLVIIGGHVDVQASMDAEEREEIRRMHEIMDRYQLDGQMRWLGSHLDKRVVGELYRVVADGRGVFVQPALFEAFGLTVIEAMSSGLPVFATRHGGPLEIIEDGVSGFHIDPNDPEAVAEKLADFLEAARERPKYWEEISQAALARVSERYTWERYAERLMTLARIFGFWRFVLSRESQVMERYLQMFRHLQWRPLAHAVPME

SEQ ID NO: 256 - protein, 793 aa, synthetic construct
MRERVEDTLSAHRNELVSLLSRYVAQGKGILQPHQLLDELEAVIGESDERQKLKDGPFGEVLKSTQEAIVLPPWVALAVRPRPGVWEYVRVNVSELTVEQLTVSEYLRFKEELVDGSSEGNAVLEVDFEDFNASFQRPKDESTIGNGVQHLNRHLSGRMWRDLESGLEPLLDFLRAHKYKGHTMMLNDRIQSFDSLRKAEQYLGKLPPDTPYSEFEYKLQELGLERGWGDTAERVLEMIRLLMDILDSPSPSTLETFLGRIPMVFNVVILSPHGYFGQANVLGLPDTGGQVVYILDQVRALENEMLLRIKQQGLDITPRILIVTRLIPDAKGTTCGQRLEKVSGTEHSHILRVPFRTEKGIVRPKWISRFDVWPYLERFAEDAANEIAAELQGKPDLIIGNYSDGNLVASLLAHKLGVTQCNIAHALEKTKYPDSDIYWKKFEEKYHFSCQFTADLIAMNHADFIITSTYQEIAGSDDTVGQYESHTAFTLPGLYRVVHGIDVFDPKFNIVSPGADMSIYFPYTEKEKRLTSLHPSIEELLYSPEQNDEHIGVLKDRSKPIIFSVARLDRVKNITGLVEWYGKNKRLRELVNLVVVAGDIDVKKSKDREEIAEIEKMHELIKKYKLNGQFRWISAHTNKVRVGELYRYIADTKGAFVQPAFYEAFGLTVVEAMTCGLPTFATCHGGPAEIIEHGVSGFHIDPYHGDQAAELLVDFFEKCKTDPSHWEKISEGGLQRIYERYTWKIYSERLMTLAGVYGFWKYVSKRERQVTRRYLQMFRHLQFRPLVHSVPLE

SEQ ID NO: 257 - protein, 793 aa, synthetic construct
MRERLEDTLSAHRNELVSLLSRYVAQGKGILQPHQLLDELEAVIEEDREREKLRDGPFGEVLRSAQEAIVLPPWVALAVRPRPGVWEYVRVNVEELSVEELTVSEYLKFKEELVDGSSEGNAVLEVDFEDFNASFQRPKDESTIGNGVQHLNRHLSGRLWRDLESGMEPLLDFLRAHKYKGKTMMLNDRIQSFDSLRKAEQYLGKLPPDTPYSEFEHKLQELGLERGWGDTAERVLEMIRLLMDLLDSPSPSTLEKFLGRIPMVFNVVILSPHGYFGQANVLGMPDTGGQVVYILDQVRALENEMLLRIKQQGLDITPRILIVTRLIPDAVGTTCNQRLEKVSGTEHSHILRVPFRTEKGILRPKWISRFDVWPYLERFAEDVASEIAAELQGKPDLIIGNYSDGNLVASLLAHKLGVTQCTIAHALEKTKYPDSDIYWKKFEEKYHFSCQFTADLIAMNHADFIITSTYQEIAGSDDTVGQYESHTAFTLPGLYRVVHGIDVFDPKFNIVSPGADMSIYFPYTEKKKRLTSLHPEIEELLYSPEQNEEHIGVLKDRSKPIIFSVARLDRVKNITGLVEWYGKNAKLRELVNLVVVAGDHDVKKSKDREEIAEIEKMHELIEKYKLNGQFRWISAHMNKVRVGELYRYIADTKGAFVQPAFYEAFGLTVVEAMTCGLPTFATCHGGPAEIIVHGKSGFHIDPYHGDQAAELLVDFFEKCKTDPSHWDKISEGGLQRIYERYTWKIYSERLMTLAGVYGFWKYVSKRERQVTRRYLQMFRHLQFRPLAHSVPLE

SEQ ID NO: 258 - protein, 793 aa, synthetic construct
MIESLEEFLAEHRDAVYLLLRHYLALGRPFLLRSDLWDEFQAFCEEQGEEEALRDSPLARLIRAAQEAVIDAPWIYLAVRPRVARWEYLRIHVETLDVEEISVSEFLAFKERLVNGDAEGEAVLEVDLGDFNREFQKLKDESTIGRGVEHLNRHLSGRLWQDLGKGDQRLLDFLRVHQCRGQQLMLNDRIRDFDALRRAEQYLGGQPPEAPWDDVGHELQELGFEPGWGRTVARMRETLRLLMDILDSPSPGTLERFLGRIPMIFSIAILSPHGYFGQSNVLGLPDTGGQVVYILDQVRALEREMRRRLAEQGLDIEPQILVVTRLIPEAGGTTCDQRLEPIVGTENARILRVPFRNEDGEVVPQWISRFEVWPYLERFALDVERELLAELGGRPDLIIGNYSDGNLVATLLSQKLGVTQCNIAHALEKTKYLYSDLYWRDNEPQYHFSCQFTADLIAMNAADFIITSTYQEIAGTDDSVGQYESYSAFTMPGLYRVVNGIDVFDPKFNIVSPGADADVYFPYTDTERRLTGLHPEIEELVFGGPERPDARGVLADRDKPLLFTVARLDRIKNITGLVEWYGRSERLRELANLLVIAGHVDPSRSSDREEREQIARMHELMDEHGLDGQVRWLGTHLDKNLVGELYRYVADRRGAFVQPALFEAFGLTVIEAMSSGLPTFATCYGGPLEIIEHGVSGFHIDPNHGEEAAELMADFFERCAADPGYWERISQGALERVESRYTWELYAERMMTLSRIYGFWKYVTNRERQVTRRYLQMFRHLQFRPLAHAVPLE

SEQ ID NO: 259 - protein, 793 aa, synthetic construct
MIDELREFLAEHRDAAYLLLRRYLGLGRPFLLRSDLWDEFLAFCEEQGEEEELKDSPLARAIRHTQEAALDAPWIYLAVRPRVARWRYLRFHLETMEVEEISVSEFLAFKERLVNGDPEGEAVLEVDLGDFNREFQKLKDESTIGRGVEHLNRHLSGRLWQDLGKGDQRLLDFLRVHQYRGQQLMLNDRIRDFDELRRALQYLGRQPDDAPWEEVAHRLRRLGFEPGWGRTVARIRDTMRLLMDILDSPSPETLERFLGRIPMIFSLAILSPHGYFGQSNVLGRPDTGGQVVYILDQVRALEREMRRRLAEQGLDIEPQILVVTRLIPEAEGTTCDQRLEPIVGTRNARILRVPFRNEDGEVVPHWISRFEVWPYLERFALDVERELLAELGGRPDLIIGNYSDGNLVATLLSQKLGVTQCNIAHALEKTKYLYSDLYWRDNEEQYHFSCQFTADLIAMNAADFIITSTYQEIAGTDDSVGQYESYSAFTMPGLYRVVNGIDVFDPKFNIVSPGADAEVYFPYTETERRLTGLHPEIEELIFGGETRPDARGVLEERDKPLLFTVARLDRIKNITGLVEWYGRSPRLRELANLLVIAGHVDPEQSGDREEREQIQRMHELMDRHGLDGQVRWLGLHLDKNLVGELYRFVADRRGAFVQPALFEAFGLTVIEAMASGLPTFATRYGGPLEIIEHGVSGFHIDPNHGEEAAELIADFFERCAEEPGYWERISRGALERVRARYTWELYAERMMTLSRIYGFWKYVTNRERQVTRRYLQMFRHLQFRPLAHAVPLE

SEQ ID NO: 260 - protein, 793 aa, synthetic construct
MIESLEEFLAEHRDQVYLLLRRYLGLGRPFLLRSDLWDEFERFCAEQGEEEELLDSPLARLIAAAQEAALDAPWLYLAVRPRVARWRYLRIHLETLEVEEIDVSEFLAFKERLVNGDPEGEAVLEVDFGDFNREFQKLKDESTIGRGVEHLNRHLSGRLWQDLGKGDQRLLEFLRVHQYRGQQLMLNDRIRDFDGLRRALQYLGKQPDDAPWEEVGHELQELGFEPGWGRTVARMRDTLRLLMDILDSPSPETLERFLGRIPMIFNIAILSPHGYFGQANVLGRPDTGGQVVYILDQVRALEREMRRRLAEQGLDIEPQILVVTRLIPEAGGTTCDQRLEPIVGTENARILRVPFRNEDGEVVPQWISRFEVWPYLERFALDVEKELLAELGGRPDLIIGNYSDGNLVATLLAQKLGVTQCNIAHALEKTKYLYSDLYWRDNEPQYHFSCQFTADLIAMNAADFIITSTYQEIAGTDDSVGQYESYGAFTMPGLYRVVNGIDVFDPKFNIVSPGADAEVYFPYTETERRLTGLHPEIEELLFGGPPRPDARGVLEDRDKPLLFTVARLDRIKNITGLVEWYGRSERLRELANLLVIAGHVDPEQSGDEEEREQIGRMHELMDRYGLDGQVRWLGVHLDKNLVGELYRYIADRRGAFVQPALFEAFGLTVIEAMSSGLPTFATCYGGPLEIIEDGVSGFHIDPNHGEEAAELIADFFERCAEDPGYWERISQGALERVRSRYTWELYAERMMTLSRIYGFWKYVTNRERQVTRRYLQMFRHLQYRPLAHAVPLE

SEQ ID NO: 261 - protein, 793 aa, synthetic construct
MIESLREFLAEHREQVYLLLRHYLALGRPFLLRSDLWDEFERFCEEDGEGEGLLDSPLARLIARTQEAALDAPWIYLAVRPRVARWEYLRFHVETLEVEEISVSEFLAFKERLVNGDGEGEAVLEVDLGDFNREFQKLKDESTIGRGVEHLNRHLSGRLWQDLGKGDQRLLDFLRVHQHRGQQLMLNDRIKDFDGLRRAEQYLGRQPDEAPWSEVGHELQELGFEPGWGRTVARMRETLRLLMDILDSPSPRTLERFLGRIPMIFSIAILSPHGYFGQANVLGLPDTGGQVVYILDQVRALEREMRRRLAEQGLDIEPQILVITRLIPEAGGTTCDQRLEPIVGTENARILRVPFRNEDGEVIPHWISRFEVWPYLERFALDVERELLAELGGRPDLIIGNYSDGNLVATLLAQKLGVTQCNIAHALEKTKYLYSDLYWRDNEEQYHFSCQFTADLIAMNAADFIITSTYQEIAGTDDSVGQYESYSAFTMPGLYRVVNGIDVFDPKFNIVSPGADADVYFPYTETERRLTGLHPEIEELVFGGETRPDARGVLEDPDKPLLFTVARLDRIKNITGLVEWYGASPRLRELANLLVVAGHVDPARSSDREEREQIQRMHQLMDEYGLDGQVRWLGVHLDKNLVGELYRYVADRRGAFVQPALFEAFGLTVIEAMSSGLPTFATCYGGPLEIIEDGVSGFHIDPNHGEEAAELMADFFERCAADPGYWERISQGALERVRSRYTWELYAERMMTLSRVYGFWKYVTNRERQVTRRYLQMFRHLQFRPLAHAVPLE

SEQ ID NO: 262 - protein, 793 aa, synthetic construct
MIEALREFLAEHRDAVYRLLRRYLGLGRPFLLRSDLWDEFEAFCEEDGEESELLDSPLARLIRRTQEAALDAPWIYLAVRPRVARWRYLRIHLETLDVEEISVSEFLAFKERLVTGDAEGDAVLEVDLGDFNREFQKLKDESTIGRGVEHLNRHLSGRLWQDLGKGDQRLLDFLRVHQYRGQQLMLNDRIRDFDELRRALQYLGRQPPEAPWADVAHELQRLGFEPGWGRTAARIRDTMRLLMDILDSPSPRNLERFLGRIPMIFSLAILSPHGYFGQSNVLGLPDTGGQVVYILDQVRALEREMRQRLAEQGLDIEPQILVVTRLIPEAGGTTCDQRLEPIVGTENARILRVPFRNEDGEVVPHWISRFEVWPYLERFALDVERELLAELGGRPDLIIGNYSDGNLVATLLSQKLGVTQCNIAHALEKTKYLYSDLYWRDNEPQYHFSCQFTADLIAMNAADFIITSTYQEIAGTDDSVGQYESYSAFTMPGLYRVVNGIDVFDPKFNIVSPGADAEVYFPYTEKERRLTGLHPEIEELIFGGEERADARGVLADRDKPLLFTVARLDRIKNITGLVEWYGASPRLRELANLLVIGGHVDPERSGDREEREQIARMHELMDRHGLDGQVRWLGLHLDKNLVGELYRYVADRRGAFVQPALFEAFGLTVIEAMSSGLPTFATRYGGPLEIIEHGVSGFHIDPNHGDEAAELLADFFERCAADPGYWERISQGALERVRSRYTWELYAERMMTLSRIYGFWKYVTNRERQVTRRYLQMFRHLQYRPLAHAVPLE

SEQ ID NO: 263 - protein, 793 aa, synthetic construct
MIETLEQFLSEHREVVYLLLRRYLGLGRPFLLRSDLWDEFARFCEEQGEAEALLDSPLARIIARAQEAALDAPWIYLAVRPRVARWEYLRIHLETMEVEEISVSEFLAFKERLVTGDPEGEAVLEVDLGDFNREFQKLKDESTIGRGVEHLNRHLSGRLWQDLGKGDQRLLDFLRVHQYRGQQLMLNGRIRDFDELRRALQYLGGQPPEAPWEEVAHELQELGFEPGWGRTVARMRDTLRLLMDILDSPSPETLERFLGRIPMIFSIAILSPHGYFGQANVLGLPDTGGQVVYILDQVRALEREMRQRLHEQGLDIEPQILVVTRLIPEAGGTTCDQRLEPIVGTENARILRVPFRNEDGEVLPHWISRFEVWPYLERFALDVERELLAELGGRPDLIIGNYSDGNLVATLLAQKLGVTQCNIAHALEKTKYLYSDLYWRDNEAQYHFSCQFTADLIAMNAADFIITSTYQEIAGTDDSVGQYESYGAFTMPGLYRVVNGIDVFDPKFNIVSPGADADVYFPYTETERRLTGLHPEIEALIFGGEPRPDARGVLEDPDKPLLFTVARLDRIKNITGLVEWYGRSERLRELANLLVVAGHVDPARSGDREEREQIERMHQLMDEHGLDGQVRWLGTHLDKNLVGELYRYVADRRGAFVQPALFEAFGLTVIEAMSSGLPTFATRYGGPLEIIEHGVSGFHIDPNHGEEAAELIADFFERCAADPGYWERLSQGALERVRSRYTWKLYAERMMTLSRIYGFWKYVTNRERQVTRRYLQMFRHLQFRPLAHAVPLE

SEQ ID NO: 264 - protein, 793 aa, synthetic construct
MIEELRQFLAEHRDAVYLLLRRYLALGRPFLLRSDLWDEFAAFCEEDGEEEELRDSPLARAIARAQEAVLDAPWIYFAVRPRVARWRYLRIHLETLEVEEISVSEFLAFKERLVNPDPEGDAVLEVDLGDFNREFQKLKDESTIGRGVEHLNRHLSGRLWQDLGKGDQRLLDFLRVHQYRGQQLMLNDRIRDFDELRRAEQYLGGQPPEAPWEEVAHDLQRLGFEPGWGRTAARMRDTLRLLMDILDSPSPATLERFLGRIPMIFSLAILSPHGYFGQSNVLGRPDTGGQVVYILDQVRALEKEMRRRLAEQGLDIEPQILVVTRLIPEAGGTTCDQRLEPIVGTENARILRVPFRNEDGEVVPHWISRFEVWPYLERFALDVEKELLAELGGRPDLIIGNYSDGNLVATLLSQKLGVTQCNIAHALEKTKYLYSDLYWRDNEEQYHFSCQFTADLIAMNAADFIITSTYQEIAGTDDSVGQYESYSAFTMPGLYRVVNGIDVFDPKFNIVSPGADAEVYFPYTETERRLTGLHPEIESLIYGGPPRPDARGVLADRDKPLLFTVARLDRIKNITGLVEWYGASPRLRELANLLVIAGHVDPEHSDDEEEREQIARMHELMDRHGLDGQVRWLGLHLDKNLVGELYRYVADRRGAFVQPALFEAFGLTVIEAMSSGLPTFATCYGGPLEIIEHGVSGFHIDPNHGEAAAELMADFFERCAAEPGYWERISRGALERVAARYTWKLYAERMMTLSRIYGFWKYVTNRERQVTRRYLQMFRHLQFRPLAHAVPLE

SEQ ID NO: 265 - protein, 793 aa, synthetic construct
MIESLREFLSEHRDAVYLLLRHYLGLGRPFLLRSDLWDEFERFCEEDGEEEALLDSPLARAIAATQEAAVDAPWIYLAVRPRVARWEYLRFHLETLEVEEISVSEFLAFKERLVNGDAEGDAVLEVDLGDFNREFQKLKDESTIGRGVEHLNRHLSGRLWQDLGKGDQRLLDFLRVHQYRGQQLMLNDRIKDFDELRRALQYLGGQPPDAPWEEVGHALQELGFEPGWGRTAARMRDTLRLLMDILDSPSPATLERFLGRIPMIFSIAILSPHGYFGQANVLGRPDTGGQVVYILDQVRALEREMRQRLHEQGLDIEPQILVVTRLIPEAGGTTCDQRLEPIVGTENARILRVPFRNEDGEVIPQWISRFEVWPYLERFALDVERELLAELGGRPDLIIGNYSDGNLVATLLAQKLGVTQCNIAHALEKTKYLYSDLYWRDNEEQYHFSCQFTADLIAMNAADFIITSTYQEIAGTDDSVGQYESYGAFTMPGLYRVVNGIDVFDPKFNIVSPGADAEIYFPYTETERRLTSLHPEIEELIYGGEDRPDARGVLEDPDKPLLFTVARLDRIKNITGLVEWYGRSERLRELANLLVIAGHVDASQSSDREEREQIGRMHELMDEYGLDGQVRWLGAHLDKNLVGELYRYIADRRGAFVQPALFEAFGLTVIEAMTSGLPTFATCYGGPLEIIEDGVSGFHIDPNHGEEAAERIADFFERCAAEPGYWERISQGALERVRSRYTWELYAERMMTLSRIYGFWKYVTNRERQVTRRYLQMFRHLQYRPLAHAVPLE

SEQ ID NO: 266 - protein, 793 aa, synthetic construct
MIEELREFLRDHRESVYLLLRRYLALGRPFLLRSDLWDEFLAFCEEDGGEEALADSPLARAIRRAQEAALDAPWIYLALRPRVARWEYLRIHLETLDVEEISVSEFLAFKERLVGGDAEGEAVLEVDLGDFNREFQKLKDESTIGRGVEHLNRHLSGRLWQDLGKGDQRLLDFLRVHQYRGQQLMLNDRIRDFDALRRALQYLGRQPPEAPWEEVAHELQRLGFEPGWGRTAARIRDTMRLLMDILDSPSPATLERFLGRIPMIFSIAILSPHGYFGQANVLGLPDTGGQVVYILDQVRALEREMRRRLAEQGLDIEPQILVVTRLIPEAGGTTCDQRLEPIVGTENARILRVPFRNEDGEVVPHWISRFEVWPYLERYALDVERELLAELGGRPDLIIGNYSDGNLVATLLSQKLGVTQCNIAHALEKTKYLYSDLYWRDNEEQYHFSCQFTADLIAMNAADFIITSTYQEIAGTDDSVGQYESYSAFTMPGLYRVVNGIDVFDPKFNIVSPGADAEIYFPYTDTERRLTGLHPEIEELVFGGEPRPDARGVLAEPDKPLLFTVARLDRIKNITGLVEWYGASERLRELANLLVIAGHVDPARSSDREEREQIQRMHELMDEHGLDGQVRWLGVHLDKNLVGELYRYVADRRGAFVQPALFEAFGLTVIEAMSSGLPTFATRYGGPLEIIEHGVSGFHIDPNHGEAAAELIADFFERCAADPGYWERISQGALARVEARYTWKLYAERMMTLSRIYGFWKYVTNRERQVTRRYLQMFRHLQFRPLAHAVPLE

SEQ ID NO: 267 - protein, 793 aa, synthetic construct
MIEVLRQQLLDSPRSWRAFLRHLVASQRDSWLHTDLQHACKTFREQPPEGYPEDIGWLADFIAHCQEAIFRDPWMVFAWRLRPGVWEYVRIHVEQLAVEELSTDEYLQAKEQLVGLGAEGEAVLTVDFEDFRPVSQRLKDESTIGDGLTHLNRHLAGRIWTDLAAGRSAILEFLGLHRLDNQNLMLSNGNTDFDSLRQTVQYLGTLPRETPWAEFREDMRRRGFEPGWGNTAGRVRETMRLLMDLLDSPSPAALESFLDRIPMISNVLIVSIHGWFAQDKVLGRPDTGGQVVYILDQARALEREMRNRLRQQGVDVEPRILIATRLIPESDGTTCDQRLEPVHGAENVQILRVPFRYEDGRIHPHWISRFKVWPYLERYARDLEREVKAELGSRPDLIIGNYSDGGLVATILSEKLGVTQCNIAHALEKSKYPGSDLHWPLYEQDHHFACQFTADLIAMNAADIIVTSTYQEIAGNDREVGQYESHQDYTLPGLYRVENGIDVFDSKFNIVSPGADPSTYFSYARHEERFSSLWPEIESIVFGREPGPDIRGVLEDPQKPIILSIARMDRIKNLSGLAELYGRSARLRSLANLIIIGGHVDVQASMDAEEREEIRRMHEIMDRYQLDGQMRWLGSHLDKRWVGEWYRWIADGRGVWVQPALFEAFGLTVIEVMSSGLPVFATRHGGPLEIIEDGVSGFHIDPNDPEAVAEKLADFLEAARERPKYWEEISQAALARVSERYTWERYAERLMTIARCFGFWRFVLSRESQVMERYLQMFRHLQWRPLAHAVPME

SEQ ID NO: 268 - protein, 793 aa, synthetic construct
MIEVLRQQLLDSPRSWRAFLRHLVASQRDSWLHTDLQHACKTFREQPPEGYPEDIGWLADFIAHCQEAIFRDPWMVFAWRLRPGVWEYVRIHVEQLAVEELSTDEYLQAKEQLVGLGAEGEAVLTVDFEDFRPVSQRLKDESTIGDGLTHLNRHLAGRWWTDLAAGRSAIVEWIGLHRIDNQNLLWSNGNTDWDSIRQILQYLGTLPRETPWAEFREDWRRRGWEPGWGNTAGRVRETLRILWDLIDSPSPAALESWLDRLPLISNVLIVSIHGWFAQDKVLGRPDTGGQVVYILDQARALEREMRNRLRQQGIDIEPRILIATRLIPESDGTTCDQRLEPVHGAENVQILRVPFRYEDGRIHPHWISRFKVWPYLERYARDLEREVKAELGSRPDLIIGNYSDGGLVATILSEKLGVTQCNIAHALEKSKYPGSDLHWPLYEQDHHFACQFTADLIAMNAADIIVTSTYQEIAGNDREVGQYESHQDYTLPGLYRVENGIDVFDSKFNIVSPGADPSTYFSYARHEERFSSLWPEIESLLFGREPGPDIRGVLEDPQKPIILSVARMDRIKNLSGLAELYGRSARLRSLANLVIIGGHVDVQASMDAEEREEIRRMHEIMDRYQLDGQMRWVGSHLDKRVVGELYRVVADGRGVFVQPALFEAFGLTVIEAMSSGLPVFATRHGGPLEIIEDGVSGFHIDPNDPEAVAEKLADFLEAARERPKYWEEISQAALARVSERYTWERYAERLMTIARVFGLWRFLLSRESQVMERYLQMFRHLQWRPLAHAVPME

SEQ ID NO: 269 - protein, 793 aa, synthetic construct
MIEVLRQQLLDSPRSWRAFLRHLVASQRDSWLHTDLQHACKTFREQPPEGYPEDIGWLADFIAHCQEAIFRDPWMVFAWRLRPGVWEYVRIHVEQLAVEELSTDEYLQAKEQLVGLGAEGEAVLTVDFEDFRPVSQRLKDESTIGDGLTHLNRHIAGRLWTDLAAGRSAWIEWLGLHRIDNQNLWLSNGNTDLDSLRQILQYLGTLPRETPWAEFREDWRRRGWEPGWGNTAGRVRETLRIWMDLLDSPSPAAIESFLDRLPLISNVLIVSIHGWFAQDKVLGRPDTGGQVVYILDQARALEREMRNRLRQQGIDIEPRILIATRLIPESDGTTCDQRLEPVHGAENVQILRVPFRYEDGRIHPHWISRFKVWPYLERYARDLEREVKAELGSRPDLIIGNYSDGGLVATILSEKLGVTQCNIAHALEKSKYPGSDLHWPLYEQDHHFACQFTADLIAMNAADIIVTSTYQEIAGNDREVGQYESHQDYTLPGLYRVENGIDVFDSKFNIVSPGADPSTYFSYARHEERFSSLWPEIESLLFGREPGPDIRGVLEDPQKPIILSVARMDRIKNLSGLAELYGRSARLRSLANLVIIGGHVDVQASMDAEEREEIRRMHEIMDRYQLDGQMRWVGSHLDKRVVGELYRVVADGRGVFVQPALFEAFGLTVIEAMSSGLPVFATRHGGPLEIIEDGVSGFHIDPNDPEAVAEKLADFLEAARERPKYWEEISQAALARVSERYTWERYAERLMTIARVFGWWRFLLSRESQVMERYLQMFRHLQWRPLAHAVPME

SEQ ID NO: 270 - protein, 793 aa, synthetic construct
MIEVLRQQLLDSPRSWRAFLRHLVASQRDSWLHTDLQHACKTFREQPPEGYPEDIGWLADFIAHCQEAIFRDPWMVFAWRLRPGVWEYVRIHVEQLAVEELSTDEYLQAKEQLVGLGAEGEAVLTVDFEDFRPVSQRLKDESTIGDGLTHLNRHIAGRIWTDWAAGRSAILEWLGLHRIDNQNLWLSNGNTDMDSLRQILQYLGTLPRETPWAEFREDLRRRGIEPGWGNTAGRVRETWRILMDLIDSPSPAAIESWLDRLPLISNVLIVSIHGWFAQDKVLGRPDTGGQVVYILDQARALEREMRNRLRQQGIDIEPRILIATRLIPESDGTTCDQRLEPVHGAENVQILRVPFRYEDGRIHPHWISRFKVWPYLERYARDLEREVKAELGSRPDLIIGNYSDGGLVATILSEKLGVTQCNIAHALEKSKYPGSDLHWPLYEQDHHFACQFTADLIAMNAADIIVTSTYQEIAGNDREVGQYESHQDYTLPGLYRVENGIDVFDSKFNIVSPGADPSTYFSYARHEERFSSLWPEIESLLFGREPGPDIRGVLEDPQKPIILSVARMDRIKNLSGLAELYGRSARLRSLANLVIIGGHVDVQASMDAEEREEIRRMHEIMDRYQLDGQMRWVGSHLDKRVVGELYRVVADGRGVFVQPALFEAFGLTVIEAMSSGLPVFATRHGGPLEIIEDGVSGFHIDPNDPEAVAEKLADFLEAARERPKYWEEISQAALARVSERYTWERYAERLMTIARVFGWWRFILSRESQVMERYLQMFRHLQWRPLAHAVPME

SEQ ID NO: 271 - protein, 793 aa, synthetic construct
MIEVLRQQLLDSPRSWRAFLRHLVASQRDSWLHTDLQHACKTFREQPPEGYPEDIGWLADFIAHCQEAIFRDPWMVFAWRLRPGVWEYVRIHVEQLAVEELSTDEYLQAKEQLVGLGAEGEAVLTVDFEDFRPVSQRLKDESTIGDGLTHLNRHLAGRLWTDLAAGRSAILEFLGLHRIDNQNLWLSNGNTDWDSLRQILQYLGTLPRETPWAEFREDWRRRGWEPGWGNTAGRVRETLRIWWDLMDSPSPAAWESWLDRLPLISNVLIVSIHGWFAQDKVLGRPDTGGQVVYILDQARALEREMRNRLRQQGIDIEPRILIATRLIPESDGTTCDQRLEPVHGAENVQILRVPFRYEDGRIHPHWISRFKVWPYLERYARDLEREVKAELGSRPDLIIGNYSDGGLVATILSEKLGVTQCNIAHALEKSKYPGSDLHWPLYEQDHHFACQFTADLIAMNAADIIVTSTYQEIAGNDREVGQYESHQDYTLPGLYRVENGIDVFDSKFNIVSPGADPSTYFSYARHEERFSSLWPEIESLLFGREPGPDIRGVLEDPQKPIILSVARMDRIKNLSGLAELYGRSARLRSLANLVIIGGHVDVQASMDAEEREEIRRMHEIMDRYQLDGQMRWVGSHLDKRVVGELYRVVADGRGVFVQPALFEAFGLTVIEAMSSGLPVFATRHGGPLEIIEDGVSGFHIDPNDPEAVAEKLADFLEAARERPKYWEEISQAALARVSERYTWERYAERLMTIARVFGFWRFLLSRESQVMERYLQMFRHLQWRPLAHAVPME

SEQ ID NO: 272 - protein, 793 aa, synthetic construct
MIEVLRQQLLDSPRSWRAFLRHLVASQRDSWLHTDLQHACKTFREQPPEGYPEDIGWLADFIAHCQEAIFRDPWMVFAWRLRPGVWEYVRIHVEQLAVEELSTDEYLQAKEQLVGLGAEGEAVLTVDFEDFRPVSQRLKDESTIGDGLTHLNRHLAGRIWTDLAAGRSAILEFLGLHRLDNQNLMLSNGNTDFDSLRQTVQYLGTLPRETPWAEFREDMRRRGFEPGWGNTAGRVRETMRLLMDLLDSPSPAALESFLDRIPMISNILIVSIHGWFAQDKVLGRPDTGGQVVWILDQARALEREIRNRLRQQGVDVEPRILIATRLIPESDGTTCDQRLEPVHGAENVQILRVPFRYEDGRIHPHWISRFKVWPYLERYARDLEREVKAELGSRPDLIIGNYSDGGLVATILSEKLGVTQINVAHALEKSKYPGSDLHWPLYEQDHHFACQFTADLIAMNAADMIITSTYQEIAGNDREVGQYESHQDYTLPGLYRVENGIDVFDSKFNILSPGADPSTYFSYARHEERFSSLWPEIESLLFGREPGPDIRGVLEDPQKPIILSVARMDRIKNLSGLAELYGRSARLRSLANLVIIGGHVDVQASMDAEEREEIRRMHEIMDRYQLDGQMRWVGSHLDKRVVGELYRVVADGRGVFVQPALFEAFGLTVIEAMSSGLPVFATRHGGPLEIIEDGVSGFHIDPNDPEAVAEKLADFLEAARERPKYWEEISQAALARVSERYTWERWAERWLTWVRCWGFWRFVLSRESQVMERYLQMFRHLQWRPLAHAVPME

SEQ ID NO: 273 - protein, 793 aa, synthetic construct
MIEVLRQQLLDSPRSWRAFLRHLVASQRDSWLHTDLQHACKTFREQPPEGYPEDIGWLADFIAHCQEAIFRDPWMVFAWRLRPGVWEYVRIHVEQLAVEELSTDEYLQAKEQLVGLGAEGEAVLTVDFEDFRPVSQRLKDESTIGDGLTHLNRHLAGRIWTDLAAGRSAILEFLGLHRLDNQNLMLSNGNTDFDSLRQTVQYLGTLPRETPWAEFREDMRRRGFEPGWGNTAGRVRETMRLLMDLLDSPSPAALESFLDRIPMISNILIVSIHGWFAQDKVLGRPDTGGQVVFILDQARALEREIRNRLRQQGVDVEPRILIATRLIPESDGTTCDQRLEPVHGAENVQILRVPFRYEDGRIHPHWISRFKVWPYLERYARDLEREVKAELGSRPDVIIGNYSDGGLVATILSEKLGVTQVNIAHALEKSKYPGSDLHWPLYEQDHHFACQFTADLIAMNAADMIITSTYQEIAGNDREVGQYESHQDYTLPGLYRVENGIDVFDSKFNIISPGADPSTYFSYARHEERFSSLWPEIESLLFGREPGPDIRGVLEDPQKPIILSVARMDRIKNLSGLAELYGRSARLRSLANLVIIGGHVDVQASMDAEEREEIRRMHEIMDRYQLDGQMRWVGSHLDKRVVGELYRVVADGRGVFVQPALFEAFGLTVIEAMSSGLPVFATRHGGPLEIIEDGVSGFHIDPNDPEAVAEKLADFLEAARERPKYWEEISQAALARVSERYTWERWAERWLTILRCWGFWRFVLSRESQVMERYLQMFRHLQWRPLAHAVPME

SEQ ID NO: 274 - protein, 793 aa, synthetic construct
MIEVLRQQLLDSPRSWRAFLRHLVASQRDSWLHTDLQHACKTFREQPPEGYPEDIGWLADFIAHCQEAIFRDPWMVFAWRLRPGVWEYVRIHVEQLAVEELSTDEYLQAKEQLVGLGAEGEAVLTVDFEDFRPVSQRLKDESTIGDGLTHLNRHLAGRIWTDLAAGRSAILEFLGLHRLDNQNLMLSNGNTDFDSLRQTVQYLGTLPRETPWAEFREDMRRRGFEPGWGNTAGRVRETMRLLMDLLDSPSPAALESFLDRIPMISNVLIVSIHGWFAQDKVLGRPDTGGQVVYILDQARALEREMRNRLRQQGVDVEPRILIATRLIPESDGTTCDQRLEPVHGAENVQILRVPFRYEDGRIHPHWISRFKVWPYLERYARDLEREVKAELGSRPDLIIGNYSDGGLVATILSEKLGVTQCNIAHALEKSKYPGSDLHWPLYEQDHHFACQFTADLIAMNAADIIVTSTYQEIAGNDREVGQYESHQDYTLPGLYRVENGIDVFDSKFNIVSPGADPSTYFSYARHEERFSSLWPEIESLLFGREPGPDIRGVLEDPQKPILLSVARLDRIKNLSGLLEMWGRSARLRSLANLVIIGGHVDVQASMDAEEREEVRRLHEIMDRYQLDGQVRWVGSHLDKRVVGELYRVVADGRGIFIQPALFEAFGLTVIEAMSSGLPVWATRHGGPLEIIEDGVSGFHIDPNDPEAVIEKIADLWEAARERPKYWEEISQAALARVSERYTWERYAERLMTIARCFGFWRFVLSRESQVMERYLQMFRHLQWRPLAHAVPME

SEQ ID NO: 275 - protein, 793 aa, synthetic construct
MIEVLRQQLLDSPRSWRAFLRHLVASQRDSWLHTDLQHACKTFREQPPEGYPEDIGWLADFIAHCQEAIFRDPWMVFAWRLRPGVWEYVRIHVEQLAVEELSTDEYLQAKEQLVGLGAEGEAVLTVDFEDFRPVSQRLKDESTIGDGLTHLNRHLAGRIWTDLAAGRSAILEFLGLHRLDNQNLMLSNGNTDFDSLRQTVQYLGTLPRETPWAEFREDMRRRGFEPGWGNTAGRVRETMRLLMDLLDSPSPAALESFLDRIPMISNVLIVSIHGWFAQDKVLGRPDTGGQVVYILDQARALEREMRNRLRQQGVDVEPRILIATRLIPESDGTTCDQRLEPVHGAENVQILRVPFRYEDGRIHPHWISRFKVWPYLERYARDLEREVKAELGSRPDLIIGNYSDGGLVATILSEKLGVTQCNIAHALEKSKYPGSDLHWPLYEQDHHFACQFTADLIAMNAADIIVTSTYQEIAGNDREVGQYESHQDYTLPGLYRVENGIDVFDSKFNIVSPGADPSTYFSYARHEERFSSLWPEIESIVFGREPGPDIRGVLEDPQKPIIVSIARMDRIKNLSGLAELYGRSARLRSLANLIIIGGHVDVQASMDAEEREEIRRMHEIMDRYQLDGQMRWIGSHLDKRWVGEWYRWIADGRGVWVQPALFEAFGLTVIEVMSSGLPVFATRHGGPLEIIEDGVSGFHIDPNDPEAVAEKLADFLEAARERPKYWEEISQAALARVSERYTWERYAERLMTIARCFGFWRFVLSRESQVMERYLQMFRHLQWRPLAHAVPME

SEQ ID NO: 276 - protein, 793 aa, synthetic construct
MIEVLRQQLLDSPRSWRAFLRHLVASQRDSWLHTDLQHACKTFREQPPEGYPEDIGWLADFIAHCQEAIFRDPWMVFAWRLRPGVWEYVRIHVEQLAVEELSTDEYLQAKEQLVGLGAEGEAVLTVDFEDFRPVSQRLKDESTIGDGLTHLNRHLAGRIWTDLAAGRSAILEFLGLHRLDNQNLMLSNGNTDFDSLRQTVQYLGTLPRETPWAEFREDMRRRGFEPGWGNTAGRVRETMRLLMDLLDSPSPAALESFLDRIPMISNVLIVSIHGWFAQDKVLGRPDTGGQVVYILDQARALEREMRNRLRQQGVDVEPRILIATRLIPESDGTTCDQRLEPVHGAENVQILRVPFRYEDGRIHPHWISRFKVWPYLERYARDLEREVKAELGSRPDLIIGNYSDGGLVATILSEKLGVTQCNIAHALEKSKYPGSDLHWPLYEQDHHFACQFTADLIAMNAADIIVTSTYQEIAGNDREVGQYESHQDYTLPGLYRVENGIDVFDSKFNIVSPGADPSTYFSYARHEERFSSLWPEIESIWFGREPGPDIRGVLEDPQKPLIISWARMDRIKNLSGLAELYGRSARLRSLANLIIWGGHVDVQASMDAEEREEIRRMHEIMDRYQLDGQMRWVGSHLDKRLVGEIYRIVADGRGVIVQPALFEAFGLTVIEVMSSGLPVFATRHGGPLEIIEDGVSGFHIDPNDPEAVAEKLADFLEAARERPKYWEEISQAALARVSERYTWERYAERLMTIARCFGFWRFVLSRESQVMERYLQMFRHLQWRPLAHAVPME

SEQ ID NO: 277 - protein, 793 aa, synthetic construct
MIEVLRQQLLDSPRSWRAFLRHLVASQRDSWLHTDLQHACKTFREQPPEGYPEDIGWLADFIAHCQEAIFRDPWMVFAWRLRPGVWEYVRIHVEQLAVEELSTDEYLQAKEQLVGLGAEGEAVLTVDFEDFRPVSQRLKDESTIGDGLTHLNRHIAGRWWTDNAAGRSAWIEWLGLHRIDNQNLLWSNGNTDLDSVRQLLQYLGTIPRETPWAELREDIRRRGWEPGLGNTAGRVRETLRLWVDWWDSPSPAALESILDRIPIISNVLIVSIHGWFAQDKVLGRPDTGGQVVYILDQARALEREMRNRLRQQGIDVEPRILIATRLIPESDGTTCDQRLEPVHGAENVQILRVPFRYEDGRIHPHWISRFKVWPYLERYARDLEREVKAELGSRPDLIIGNYSDGGLVATILSEKLGVTQCNIAHALEKSKYPGSDLHWPLYEQDHHFACQFTADLIAMNAADIIVTSTYQEIAGNDREVGQYESHQDYTLPGLYRVENGIDVFDSKFNIVSPGADPSTYFSYARHEERFSSLWPEIESLLFGREPGPDIRGVLEDPQKPIILSVARMDRIKNLSGLAELYGRSARLRSLANLVIIGGHVDVQASMDAEEREEIRRMHEIMDRYQLDGQMRWVGSHLDKRVVGELYRVVADGRGVFVQPALFEAFGLTVIEAMSSGLPVFATRHGGPLEIIEDGVSGFHIDPNDPEAVAEKLADFLEAARERPKYWEEISQAALARVSERYTWERYAERLMTIARVFGLWRFLLSRESQVMERYLQMFRHLQWRPLAHAVPME

SEQ ID NO: 278 - protein, 793 aa, synthetic construct
MIEVLRQQLLDSPRSWRAFLRHLVASQRDSWLHTDLQHACKTFREQPPEGYPEDIGWLADFIAHCQEAIFRDPWMVFAWRLRPGVWEYVRIHVEQLAVEELSTDEYLQAKEQLVGLGAEGEAVLTVDFEDFRPVSQRLKDESTIGDGLTHLNRHIAGRIWTDVAAGRSAILEWLGLHRIDNQNLWWSNGNTDWDSIRQILQYLGTLPRETPLAELREDWRRRGWEPGWGNTAGRIRETLRILWDLIDSPSPAAWESWLDRVPIISNVLIVSIHGWFAQDKVLGRPDTGGQVVYILDQARALEREMRNRLRQQGIDVEPRILIATRLIPESDGTTCDQRLEPVHGAENVQILRVPFRYEDGRIHPHWISRFKVWPYLERYARDLEREVKAELGSRPDLIIGNYSDGGLVATILSEKLGVTQCNIAHALEKSKYPGSDLHWPLYEQDHHFACQFTADLIAMNAADIIVTSTYQEIAGNDREVGQYESHQDYTLPGLYRVENGIDVFDSKFNIVSPGADPSTYFSYARHEERFSSLWPEIESLLFGREPGPDIRGVLEDPQKPIILSVARMDRIKNLSGLAELYGRSARLRSLANLVIIGGHVDVQASMDAEEREEIRRMHEIMDRYQLDGQMRWVGSHLDKRVVGELYRVVADGRGVFVQPALFEAFGLTVIEAMSSGLPVFATRHGGPLEIIEDGVSGFHIDPNDPEAVAEKLADFLEAARERPKYWEEISQAALARVSERYTWERYAERLMTIARIFGLWRFWLSRESQVMERYLQMFRHLQWRPLAHAVPME

SEQ ID NO: 279 - protein, 793 aa, synthetic construct
MIEVLRQQLLDSPRSWRAFLRHLVASQRDSWLHTDLQHACKTFREQPPEGYPEDIGWLADFIAHCQEAIFRDPWMVFAWRLRPGVWEYVRIHVEQLAVEELSTDEYLQAKEQLVGLGAEGEAVLTVDFEDFRPVSQRLKDESTIGDGLTHLNRHLAGRWWTDLAAGRSALLEWLGLHRLDNQNLWWSNGNTDWDSVRQWLQYLGTLPRETPLAELREDLRRRGWEPGMGNTAGRIRETLRLLLDLLDSPSPAALESWLDRVPVISNVLIVSIHGWFAQDKVLGRPDTGGQVVYILDQARALEREMRNRLRQQGIDIEPRILIATRLIPESDGTTCDQRLEPVHGAENVQILRVPFRYEDGRIHPHWISRFKVWPYLERYARDLEREVKAELGSRPDLIIGNYSDGGLVATILSEKLGVTQCNIAHALEKSKYPGSDLHWPLYEQDHHFACQFTADLIAMNAADIIVTSTYQEIAGNDREVGQYESHQDYTLPGLYRVENGIDVFDSKFNIVSPGADPSTYFSYARHEERFSSLWPEIESLLFGREPGPDIRGVLEDPQKPIILSVARMDRIKNLSGLAELYGRSARLRSLANLVIIGGHVDVQASMDAEEREEIRRMHEIMDRYQLDGQMRWVGSHLDKRVVGELYRVVADGRGVFVQPALFEAFGLTVIEAMSSGLPVFATRHGGPLEIIEDGVSGFHIDPNDPEAVAEKLADFLEAARERPKYWEEISQAALARVSERYTWERYAERLMTIARVFGLWRFILSRESQVMERYLQMFRHLQWRPLAHAVPME

SEQ ID NO: 280 - protein, 793 aa, synthetic construct
MIEVLRQQLLDSPRSWRAFLRHLVASQRDSWLHTDLQHACKTFREQPPEGYPEDIGWLADFIAHCQEAIFRDPWMVFAWRLRPGVWEYVRIHVEQLAVEELSTDEYLQAKEQLVGLGAEGEAVLTVDFEDFRPVSQRLKDESTIGDGLTHLNRHLAGRIWTDLAAGRSAILEFLGLHRLDNQNLMLSNGNTDFDSLRQTVQYLGTLPRETPWAEFREDMRRRGFEPGWGNTAGRVRETMRLLMDLLDSPSPAALESFLDRIPMISNILIVSIHGWFAQDKVLGRPDTGGQVVVILDQARALERELRNRLRQQGVDVEPRILIATRLIPESDGTTCDQRLEPVHGAENVQILRVPFRYEDGRIHPHWISRFKVWPYLERYARDLEREVKAELGSRPDVIIGNYSDGGLVATILSEKLGVTQVNMAHALEKSKYPGSDLHWPLYEQDHHFACQFTADLIAMNAADVIITSTYQEIAGNDREVGQYESHQDYTLPGLYRVENGIDVFDSKFNIISPGADPSTYFSYARHEERFSSLWPEIESLLFGREPGPDIRGVLEDPQKPIILSVARMDRIKNLSGLAELYGRSARLRSLANLVIIGGHVDVQASMDAEEREEIRRMHEIMDRYQLDGQMRWVGSHLDKRVVGELYRVVADGRGVFVQPALFEAFGLTVIEAMSSGLPVFATRHGGPLEIIEDGVSGFHIDPNDPEAVAEKLADFLEAARERPKYWEEISQAALARVSERYTWERWAERILTLWRCLGFWRFVLSRESQVMERYLQMFRHLQWRPLAHAVPME

SEQ ID NO: 281 - protein, 793 aa, synthetic construct
MIEVLRQQLLDSPRSWRAFLRHLVASQRDSWLHTDLQHACKTFREQPPEGYPEDIGWLADFIAHCQEAIFRDPWMVFAWRLRPGVWEYVRIHVEQLAVEELSTDEYLQAKEQLVGLGAEGEAVLTVDFEDFRPVSQRLKDESTIGDGLTHLNRHLAGRIWTDLAAGRSAILEFLGLHRLDNQNLMLSNGNTDFDSLRQTVQYLGTLPRETPWAEFREDMRRRGFEPGWGNTAGRVRETMRLLMDLLDSPSPAALESFLDRIPMISNILWVSIHGWFAQDKVLGRPDTGGQVVILLDQARALEREIRNRLRQQGVDVEPRILWATRLIPESDGTTCDQRLEPVHGAENVQILRVPFRYEDGRIHPHWISRFKVWPYLERYARDLEREVKAELGSRPDVIIGNYSDGGLVATILSEKLGVTQLNMAHALEKSKYPGSDLHWPLYEQDHHFACQFTADLIAMNAADIIVTSTYQEIAGNDREVGQYESHQDYTLPGLYRVENGIDVFDSKFNIISPGADPSTYFSYARHEERFSSLWPEIESLLFGREPGPDIRGVLEDPQKPIILSVARMDRIKNLSGLAELYGRSARLRSLANLVIIGGHVDVQASMDAEEREEIRRMHEIMDRYQLDGQMRWVGSHLDKRVVGELYRVVADGRGVFVQPALFEAFGLTVIEAMSSGLPVFATRHGGPLEIIEDGVSGFHIDPNDPEAVAEKLADFLEAARERPKYWEEISQAALARVSERYTWERWAERIMTIWRCLGFWRFVLSRESQVMERYLQMFRHLQWRPLAHAVPME

SEQ ID NO: 282 - protein, 793 aa, synthetic construct
MIEVLRQQLLDSPRSWRAFLRHLVASQRDSWLHTDLQHACKTFREQPPEGYPEDIGWLADFIAHCQEAIFRDPWMVFAWRLRPGVWEYVRIHVEQLAVEELSTDEYLQAKEQLVGLGAEGEAVLTVDFEDFRPVSQRLKDESTIGDGLTHLNRHLAGRIWTDLAAGRSAILEFLGLHRLDNQNLMLSNGNTDFDSLRQTVQYLGTLPRETPWAEFREDMRRRGFEPGWGNTAGRVRETMRLLMDLLDSPSPAALESFLDRIPMISNVLIVSIHGWFAQDKVLGRPDTGGQVVYILDQARALEREMRNRLRQQGVDVEPRILIATRLIPESDGTTCDQRLEPVHGAENVQILRVPFRYEDGRIHPHWISRFKVWPYLERYARDLEREVKAELGSRPDVIIGNYSDGGLVATILSEKLGVTQINIAHALEKSKYPGSDLHWPLYEQDHHFACQFTADLIAMNAADAIVTSTYQEIAGNDREVGQYESHQDYTLPGLYRVENGIDVFDSKFNIISPGADPSTYFSYARHEERFSSLWPEIESLLFGREPGPDIRGVLEDPQKPIILSVARMDRIKNLSGLAELYGRSARLRSLANLVIIGGHVDVQASMDAEEREEIRRMHEIMDRYQLDGQMRWVGSHLDKRVVGELYRVVADGRGVFVQPALFEAFGLTVIEAMSSGLPVFATRHGGPLEIIEDGVSGFHIDPNDPEAVAEKLADFLEAARERPKYWEEISQAALARVSERYTWERYAERMMTLARCMGFWRFVLSRESQVMERYLQMFRHLQWRPLAHAVPME

SEQ ID NO: 283 - protein, 793 aa, synthetic construct
MIEVLRQQLLDSPRSWRAFLRHLVASQRDSWLHTDLQHACKTFREQPPEGYPEDIGWLADFIAHCQEAIFRDPWMVFAWRLRPGVWEYVRIHVEQLAVEELSTDEYLQAKEQLVGLGAEGEAVLTVDFEDFRPVSQRLKDESTIGDGLTHLNRHLAGRIWTDLAAGRSAILEFLGLHRLDNQNLMLSNGNTDFDSLRQTVQYLGTLPRETPWAEFREDMRRRGFEPGWGNTAGRVRETMRLLMDLLDSPSPAALESFLDRIPMISNVLILSWHGWFAQDKVLGRPDTGGQVVYILDQARALEREMRNRLRQQGVDVEPRIIILTRLIPESDGTTCDQRLEPVHGAENVQILRIPFRYEDGRIHPHWISRFKVWPYLERLVRDIEREVKAELGSRPDLIIGNYSDGGLIATILSEKWGVTQCNIAHALEKSKYPGSDLHWPLYEQDHHFACQFTADLIAMNAADIIVTSTYQEIAGNDREVGQYESHQDYTLPGLYRVENGIDVFDSKFNIVSPGADPSTYFSYARHEERFSSLWPEIESLLFGREPGPDIRGVLEDPQKPIILSVARMDRIKNLSGLAELYGRSARLRSLANLVIIGGHVDVQASMDAEEREEIRRMHEIMDRYQLDGQMRWVGSHLDKRVVGELYRVVADGRGVFVQPALFEAFGLTVIEAMSSGLPVFATRHGGPLEIIEDGVSGFHIDPNDPEAVAEKLADFLEAARERPKYWEEISQAALARVSERYTWERYAERLMTIARCFGFWRFVLSRESQVMERYLQMFRHLQWRPLAHAVPME

SEQ ID NO: 284 - protein, 793 aa, synthetic construct
MIEVLRQQLLDSPRSWRAFLRHLVASQRDSWLHTDLQHACKTFREQPPEGYPEDIGWLADFIAHCQEAIFRDPWMVFAWRLRPGVWEYVRIHVEQLAVEELSTDEYLQAKEQLVGLGAEGEAVTTWDLEDLRPVSQRLKDESTIGDGLTHLNRHLAGRIWTDLAAGRSAILEFLGLHRLDNQNLMLSNGNTDFDSLRQTVQYLGTLPRETPWAEFREDMRRRGFEPGWGNTAGRVRETMRLLMDLLDSPSPAALESFLDRIPMISNVLIVSIHGWFAQDKVLGRPDTGGQVVYILDQARALEREMRNRLRQQGVDVEPRILIATRLIPESDGTTCDQRLEPVHGAENVQILRVPFRYEDGRIHPHWISRFKVWPYLERYARDLEREVKAELGSRPDLIIGNYSDGGLVATILSEKLGVTQCNIAHALEKSKYPGSDLHWPLYEQDHHFACQFTADWIAMNAADIIVTSTYQEIAGNDREVGQYESHQDYTLPGLYRVENGIDVFDSKFNIVSPGADPSTYFSYARHEERFSSLWPEIESLLFGREPGPDIRGVLEDPQKPIILSVARMDRIKNLSGLAELYGRSARLRSLANLVIIGGHVDVQASMDAEEREEIRRMHEIMDRYQLDGQMRWVGSHLDKRVVGELYRVVADGRGVFVQPALFEAFGLTVIEAMSSGLPVFATRHGGPLEIIEDGVSGFHIDPNDPEAVAEKLADFLEAARERPKYWEEISQAALARVSERYTWERYAERLMTIARCFGFWRFVLSRESQVMERYLQMIRHLQWRPLAHAVPME

SEQ ID NO: 285 - protein, 793 aa, synthetic construct
MIEELRQQLLDSPRSWRAFLRHLVASQRDSWLHTDLQRACKTFREQPPEGYPEDIGWLADFVAHTQEAIFRDPWMVFAWRLRPGVWEYVRIHVEQLAVEELSTDEYLQAKEQLVGLGAEGEAVLTVDFEDFRPVSQRLKDESTIGDGLTHLNRHLAGRIWTDLAAGRSQILEFLGLHRLDNQNLMLSNGNTDFDSLRQTVQYLGTLPRETPWAEFREDMRRRGFEPGWGNTAGRVRETMRLLMDLLDSPSPAALESFLDRIPMISNVLIVSIHGWFAQDKVLGRPDTGGQVVYILDQARALEREMRNRLRQQGVDVEPRILIATRLIPESDGTTCDQRLEPVHGAENVQILRVPFRYEDGRIHPHWISRFKVWPYLERYASDLEREVKAELGSRPDLIIGNYSDGNLVATLLSEKLGVTQCNIAHALEKSKYLYSDLHWPDHEQDHHFACQFTADLIAMNAADIIVTSTYQEIAGNDREVGQYESHQDYTLPGLYRVENGIDVFDSKFNIVSPGADPRTYFSYARTEERFSSLWPEIESLLFGREPGPDIRGVLEDRQKPIILSMGRLDRIKNLSGLLELWGRSSRLRSLANLVIIGGHLDVQNSMDAEEREEIRRLHEIMDHYQLDGQVRLVGSQLDKTVVGELYRVVADGRGIFIQPALFEAFGLTVIEAMSSGLPVWATRHGGPLEIIEDGVSGFHIDPNDPEATVEKWADWWEAARERPKYWEEISDAALARVSERYTWERYAERLMTIARCFGFWRFVLSRESQVMERYLQMFRHLQWRPLAHAVPME

SEQ ID NO: 286 - protein, 793 aa, synthetic construct
MIEELRQQLLDSPRSWRAFLRHLVASQRDSWLHTDLQRACKTFREQPPEGYPEDIGWLADFVAHTQEAIFRDPWMVFAWRLRPGVWEYVRIHVEQLAVEELSTDEYLQAKEQLVGLGAEGEAVLTVDFEDFRPVSQRLKDESTIGDGLTHLNRHLAGRIWTDLAAGRSQILEFLGLHRLDNQNLMLSNGNTDFDSLRQTVQYLGTLPRETPWAEFREDMRRRGFEPGWGNTAGRVRETMRLLMDLLDSPSPAALESFLDRIPMISNVLIVSIHGWFAQDKVLGRPDTGGQVVYILDQARALEREMRNRLRQQGVDVEPRILIATRLIPESDGTTCDQRLEPVHGAENVQILRVPFRYEDGRIHPHWISRFKVWPYLERYASDLEREVKAELGSRPDLIIGNYSDGNLVATLLSEKLGVTQCNIAHALEKSKYLYSDLHWPDHEQDHHFACQFTADLIAMNAADIIVTSTYQEIAGNDREVGQYESHQDYTLPGLYRVENGIDVFDSKFNIVSPGADPRTYFSYARTEERFSSLWPEIESLWFGREPGPDIRGVLEDRQKPIILSMARMDRIKNLSGLAELYGRSSRLRSLANLIIIGGHVDVQNSMDAEEREEIRRMHEIMDHYQLDGQMRWIGSQLDKTLVGELYRLIADGRGVWVQPALFEAFGLTVIEVMSSGLPVFATRHGGPLEIIEDGVSGFHIDPNDPEATAEKLADFLEAARERPKYWEEISDAALARVSERYTWERYAERLMTIARCFGFWRFVLSRESQVMERYLQMFRHLQWRPLAHAVPME

SEQ ID NO: 287 - protein, 793 aa, synthetic construct
MIEELRQQLLDSPRSWRAFLRHLVASQRDSWLHTDLQRACKTFREQPPEGYPEDIGWLADFVAHTQEAIFRDPWMVFAWRLRPGVWEYVRIHVEQLAVEELSTDEYLQAKEQLVGLGAEGEAVLTVDFEDFRPVSQRLKDESTIGDGLTHLNRHLAGRIWTDLAAGRSQILEFLGLHRLDNQNLMLSNGNTDFDSLRQTVQYLGTLPRETPWAEFREDMRRRGFEPGWGNTAGRVRETMRLLMDLLDSPSPAALESFLDRIPMISNVLIVSIHGWFAQDKVLGRPDTGGQVVYILDQARALEREMRNRLRQQGVDVEPRILIATRLIPESDGTTCDQRLEPVHGAENVQILRVPFRYEDGRIHPHWISRFKVWPYLERYASDLEREVKAELGSRPDLIIGNYSDGNLVATLLSEKLGVTQCNIAHALEKSKYLYSDLHWPDHEQDHHFACQFTADLIAMNAADIIVTSTYQEIAGNDREVGQYESHQDYTLPGLYRVENGIDVFDSKFNIVSPGADPRTYFSYARTEERFSSLWPEIESMLFGREPGPDIRGVLEDRQKPIILSMARMDRIKNLSGLAELYGRSSRLRSLANLIIIGGHVDVQNSMDAEEREEIRRMHEIMDHYQLDGQMRWIGSQLDKTLVGEIYRVVADGRGVWVQPALFEAFGLTVIEVMSSGLPVFATRHGGPLEIIEDGVSGFHIDPNDPEATAEKLADFLEAARERPKYWEEISDAALARVSERYTWERYAERLMTIARCFGFWRFVLSRESQVMERYLQMFRHLQWRPLAHAVPME

SEQ ID NO: 288 - protein, 793 aa, synthetic construct
MIEELRQQLLDSPRSWRAFLRHLVASQRDSWLHTDLQRACKTFREQPPEGYPEDIGWLADFVAHTQEAIFRDPWMVFAWRLRPGVWEYVRIHVEQLAVEELSTDEYLQAKEQLVGLGAEGEAVLTVDFEDFRPVSQRLKDESTIGDGLTHLNRHLAGRIWTDLAAGRSQILEFLGLHRLDNQNLMLSNGNTDFDSLRQTVQYLGTLPRETPWAEFREDMRRRGFEPGWGNTAGRVRETMRLLMDLLDSPSPAALESFLDRIPMISNILIVSIHGWFAQDKVLGRPDTGGQVVYILDQARALEREMRNRLRQQGVDVEPRILIATRLIPESDGTTCDQRLEPVHGAENVQILRVPFRYEDGRIHPHWISRFKVWPYLERYASDLEREVKAELGSRPDAIIGNYSDGNLVATLLSEKLGVTQTNIAHALEKSKYLYSDLHWPDHEQDHHFACQFTADLIAMNAADVIVTSTYQEIAGNDREVGQYESHQDYTLPGLYRVENGIDVFDSKFNIVSPGADPRTYFSYARTEERFSSLWPEIESLLFGREPGPDIRGVLEDRQKPIILSMARMDRIKNLSGLAELYGRSSRLRSLANLVIIGGHVDVQNSMDAEEREEIRRMHEIMDHYQLDGQMRWVGSQLDKTVVGELYRVVADGRGVFVQPALFEAFGLTVIEAMSSGLPVFATRHGGPLEIIEDGVSGFHIDPNDPEATAEKLADFLEAARERPKYWEEISDAALARVSERYTWERYAERMLTILRCFGFWRFVLSRESQVMERYLQMFRHLQWRPLAHAVPME

SEQ ID NO: 289 - protein, 793 aa, synthetic construct
MIEELRQQLLDSPRSWRAFLRHLVASQRDSWLHTDLQRACKTFREQPPEGYPEDIGWLADFVAHTQEAIFRDPWMVFAWRLRPGVWEYVRIHVEQLAVEELSTDEYLQAKEQLVGLGAEGEAVLTVDFEDFRPVSQRLKDESTIGDGLTHLNRHLAGRIWTDLAAGRSQILEFLGLHRLDNQNLMLSNGNTDFDSLRQTVQYLGTLPRETPWAEFREDMRRRGFEPGWGNTAGRVRETMRLLMDLLDSPSPAALESFLDRIPMISNVIIISIHGWFAQDKVLGRPDTGGQVVYILDQARALEREMRNRLRQQGVDVEPRIIILTRLIPESDGTTCDQRLEPVHGAENVQILRIPFRYEDGRIHPHWISRFKVWPYLERWVSDVEREIKAELGSRPDLIIGNYSDGNLIATLMSEKWGVTQCNIAHALEKSKYLYSDLHWPDHEQDHHFACQFTADLIAMNAADIIVTSTYQEIAGNDREVGQYESHQDYTLPGLYRVENGIDVFDSKFNIVSPGADPRTYFSYARTEERFSSLWPEIESLLFGREPGPDIRGVLEDRQKPIILSMARMDRIKNLSGLAELYGRSSRLRSLANLVIIGGHVDVQNSMDAEEREEIRRMHEIMDHYQLDGQMRWVGSQLDKTVVGELYRVVADGRGVFVQPALFEAFGLTVIEAMSSGLPVFATRHGGPLEIIEDGVSGFHIDPNDPEATAEKLADFLEAARERPKYWEEISDAALARVSERYTWERYAERLMTIARCFGFWRFVLSRESQVMERYLQMFRHLQWRPLAHAVPME

SEQ ID NO: 290 - protein, 793 aa, synthetic construct
MIEELRQQLLDSPRSWRAFLRHLVASQRDSWLHTDLQRACKTFREQPPEGYPEDIGWLADFVAHTQEAIFRDPWMVFAWRLRPGVWEYVRIHVEQLAVEELSTDEYLQAKEQLVGLGAEGEAVLTVDFEDFRPVSQRLKDESTIGDGLTHLNRHLAGRIWTDLAAGRSQILEFLGLHRLDNQNLMLSNGNTDFDSLRQTVQYLGTLPRETPWAEFREDMRRRGFEPGWGNTAGRVRETMRLLMDLLDSPSPAALESFLDRIPMISNVIIISIHGWFAQDKVLGRPDTGGQVVYILDQARALEREMRNRLRQQGVDVEPRILIITRLIPESDGTTCDQRLEPVHGAENVQILRIPFRYEDGRIHPHWISRFKVWPYLERWVSDVEREIKAELGSRPDLIIGNYSDGNLVATLMSEKWGVTQCNIAHALEKSKYLYSDLHWPDHEQDHHFACQFTADLIAMNAADIIVTSTYQEIAGNDREVGQYESHQDYTLPGLYRVENGIDVFDSKFNIVSPGADPRTYFSYARTEERFSSLWPEIESLLFGREPGPDIRGVLEDRQKPIILSMARMDRIKNLSGLAELYGRSSRLRSLANLVIIGGHVDVQNSMDAEEREEIRRMHEIMDHYQLDGQMRWVGSQLDKTVVGELYRVVADGRGVFVQPALFEAFGLTVIEAMSSGLPVFATRHGGPLEIIEDGVSGFHIDPNDPEATAEKLADFLEAARERPKYWEEISDAALARVSERYTWERYAERLMTIARCFGFWRFVLSRESQVMERYLQMFRHLQWRPLAHAVPME

SEQ ID NO: 291 - protein, 793 aa, synthetic construct
MIEELRQQLLDSPRSWRAFLRHLVASQRDSWLHTDLQRACKTFREQPPEGYPEDIGWLADFVAHTQEAIFRDPWMVFAWRLRPGVWEYVRIHVEQLAVEELSTDEYLQAKEQLVGLGAEGEAVLTVDFEDFRPVSQRLKDESTIGDGLTHLNRHLAGRIWTDLAAGRSQILEFLGLHRLDNQNLMLSNGNTDFDSLRQTVQYLGTLPRETPWAEFREDMRRRGFEPGWGNTAGRVRETMRLLMDLLDSPSPAALESFLDRIPMISNVLIVSIHGWFAQDKVLGRPDTGGQVVYILDQARALEREMRNRLRQQGVDVEPRILIATRLIPESDGTTCDQRLEPVHGAENVQILRVPFRYEDGRIHPHWISRFKVWPYLERYASDLEREVKAELGSRPDLIIGNYSDGNLVATLLSEKLGVTQCNIAHALEKSKYLYSDLHWPDHEQDHHFACQFTADLIAMNAADIIVTSTYQEIAGNDREVGQYESHQDYTLPGLYRVENGIDVFDSKFNIVSPGADPRTYFSYARTEERFSSLWPEIESLLFGREPGPDIRGVLEDRQKPIILSMMRLDRIKNLSGWWEIWGRSSRLRSLANLVVIGGHVDVQNSMDAEEREEVRRLHEILDHYQLDGQVRWVGSQLDKTVVGELYRVVADGRGIFIQPALFEAFGLTVIEAMSSGLPVWATRHGGPLEIIEDGVSGFHIDPNDPEATLEKIADWLEAARERPKYWEEISDAALARVSERYTWERYAERLMTIARCFGFWRFVLSRESQVMERYLQMFRHLQWRPLAHAVPME

SEQ ID NO: 292 - protein, 793 aa, synthetic construct
MIEELRQQLLDSPRSWRAFLRHLVASQRDSWLHTDLQRACKTFREQPPEGYPEDIGWLADFVAHTQEAIFRDPWMVFAWRLRPGVWEYVRIHVEQLAVEELSTDEYLQAKEQLVGLGAEGEAVLTVDFEDFRPVSQRLKDESTIGDGLTHLNRHLAGRIWTDLAAGRSQILEFLGLHRLDNQNLMLSNGNTDFDSLRQTVQYLGTLPRETPWAEFREDMRRRGFEPGWGNTAGRVRETMRLLMDLLDSPSPAALESFLDRIPMISNVLIVSIHGWFAQDKVLGRPDTGGQVVYILDQARALEREMRNRLRQQGVDVEPRILIATRLIPESDGTTCDQRLEPVHGAENVQILRVPFRYEDGRIHPHWISRFKVWPYLERYASDLEREVKAELGSRPDLIIGNYSDGNLVATLLSEKLGVTQCNIAHALEKSKYLYSDLHWPDHEQDHHFACQFTADLIAMNAADIIVTSTYQEIAGNDREVGQYESHQDYTLPGLYRVENGIDVFDSKFNIVSPGADPRTYFSYARTEERFSSLWPEIESIIFGREPGPDIRGVLEDRQKPIIVSIARMDRIKNLSGLAELYGRSSRLRSLANLIIIGGHVDVQNSMDAEEREEIRRMHEIMDHYQLDGQMRWIGSQLDKTWVGEWYRWVADGRGVIVQPALFEAFGLTVIEVMSSGLPVFATRHGGPLEIIEDGVSGFHIDPNDPEATAEKLADFLEAARERPKYWEEISDAALARVSERYTWERYAERLMTIARCFGFWRFVLSRESQVMERYLQMFRHLQWRPLAHAVPME

SEQ ID NO: 293 - protein, 793 aa, synthetic construct
MIEELRQQLLDSPRSWRAFLRHLVASQRDSWLHTDLQRACKTFREQPPEGYPEDIGWLADFVAHTQEAIFRDPWMVFAWRLRPGVWEYVRIHVEQLAVEELSTDEYLQAKEQLVGLGAEGEAVLTVDFEDFRPVSQRLKDESTIGDGLTHLNRHLAGRIWTDLAAGRSQILEFLGLHRLDNQNLMLSNGNTDFDSLRQTVQYLGTLPRETPWAEFREDMRRRGFEPGWGNTAGRVRETMRLLMDLLDSPSPAALESFLDRIPMISNVLIVSIHGWFAQDKVLGRPDTGGQVVYILDQARALEREMRNRLRQQGVDVEPRILIATRLIPESDGTTCDQRLEPVHGAENVQILRVPFRYEDGRIHPHWISRFKVWPYLERYASDLEREVKAELGSRPDLIIGNYSDGNLVATLLSEKLGVTQCNIAHALEKSKYLYSDLHWPDHEQDHHFACQFTADLIAMNAADIIVTSTYQEIAGNDREVGQYESHQDYTLPGLYRVENGIDVFDSKFNIVSPGADPRTYFSYARTEERFSSLWPEIESMLFGREPGPDIRGVLEDRQKPIILSMARMDRIKNLSGLAELYGRSSRLRSLANLVIIGGHVDVQNSMDAEEREEIRRMHEIMDHYQLDGQMRWIGSQLDKTIVGELYRFVADGRGVFVQPALFEAFGLTVIEAMSSGLPVFATRHGGPLEIIEDGVSGFHIDPNDPEATAEKLADFLEAARERPKYWEEISDAALARVSERYTWERYAERLMTIARCFGFWRFVLSRESQVMERYLQMFRHLQWRPLAHAVPME

SEQ ID NO: 294 - protein, 793 aa, synthetic construct
MIEELRQQLLDSPRSWRAFLRHLVASQRDSWLHTDLQRACKTFREQPPEGYPEDIGWLADFVAHTQEAIFRDPWMVFAWRLRPGVWEYVRIHVEQLAVEELSTDEYLQAKEQLVGLGAEGEAVLTVDFEDFRPVSQRLKDESTIGDGLTHLNRHIAGRLWTDLAAGRSQILEWLGLHRIDNQNLWWSNGNTDWDSLRQWLQYLGTIPRETPLAELREDMRRRGLEPGWGNTAGRIRETWRIWMDILDSPSPAAWESWLDRVPIISNVLIVSIHGWFAQDKVLGRPDTGGQVVYILDQARALEREMRNRLRQQGIDVEPRILIATRLIPESDGTTCDQRLEPVHGAENVQILRVPFRYEDGRIHPHWISRFKVWPYLERYASDLEREVKAELGSRPDLIIGNYSDGNLVATLLSEKLGVTQCNIAHALEKSKYLYSDLHWPDHEQDHHFACQFTADLIAMNAADIIVTSTYQEIAGNDREVGQYESHQDYTLPGLYRVENGIDVFDSKFNIVSPGADPRTYFSYARTEERFSSLWPEIESLLFGREPGPDIRGVLEDRQKPIILSMARMDRIKNLSGLAELYGRSSRLRSLANLVIIGGHVDVQNSMDAEEREEIRRMHEIMDHYQLDGQMRWVGSQLDKTVVGELYRVVADGRGVFVQPALFEAFGLTVIEAMSSGLPVFATRHGGPLEIIEDGVSGFHIDPNDPEATAEKLADFLEAARERPKYWEEISDAALARVSERYTWERYAERLMTIARIFGLWRFWLSRESQVMERYLQMFRHLQWRPLAHAVPME

SEQ ID NO: 295 - protein, 793 aa, synthetic construct
MIEELRQQLLDSPRSWRAFLRHLVASQRDSWLHTDLQRACKTFREQPPEGYPEDIGWLADFVAHTQEAIFRDPWMVFAWRLRPGVWEYVRIHVEQLAVEELSTDEYLQAKEQLVGLGAEGEAVLTVDFEDFRPVSQRLKDESTIGDGLTHLNRHLAGRMWTDSAAGRSQLIEFLGLHRLDNQNLMWSNGNTDIDSARQTTQYLGTLPRETPLAEFREDLRRRGFEPGWGNTAGRIRETMRLLQDLLDSPSPAALESFLDRIPMISNVLIVSIHGWFAQDKVLGRPDTGGQVVYILDQARALEREMRNRLRQQGIDVEPRILIATRLIPESDGTTCDQRLEPVHGAENVQILRVPFRYEDGRIHPHWISRFKVWPYLERYASDLEREVKAELGSRPDLIIGNYSDGNLVATLLSEKLGVTQCNIAHALEKSKYLYSDLHWPDHEQDHHFACQFTADLIAMNAADIIVTSTYQEIAGNDREVGQYESHQDYTLPGLYRVENGIDVFDSKFNIVSPGADPRTYFSYARTEERFSSLWPEIESLLFGREPGPDIRGVLEDRQKPIILSMARMDRIKNLSGLAELYGRSSRLRSLANLVIIGGHVDVQNSMDAEEREEIRRMHEIMDHYQLDGQMRWVGSQLDKTVVGELYRVVADGRGVFVQPALFEAFGLTVIEAMSSGLPVFATRHGGPLEIIEDGVSGFHIDPNDPEATAEKLADFLEAARERPKYWEEISDAALARVSERYTWERYAERLMTIARAFGFWRFVLSRESQVMERYLQMFRHLQWRPLAHAVPME

SEQ ID NO: 296 - protein, 793 aa, synthetic construct
MIEELRQQLLDSPRSWRAFLRHLVASQRDSWLHTDLQRACKTFREQPPEGYPEDIGWLADFVAHTQEAIFRDPWMVFAWRLRPGVWEYVRIHVEQLAVEELSTDEYLQAKEQLVGLGAEGEAVLTVDFEDFRPVSQRLKDESTIGDGLTHLNRHLAGRIWTDLAAGRSQILEFLGLHRLDNQNLMLSNGNTDFDSLRQTVQYLGTLPRETPWAEFREDMRRRGFEPGWGNTAGRVRETMRLLMDLLDSPSPAALESFLDRIPMISNILIVSIHGWFAQDKVLGRPDTGGQVVWILDQARALERELRNRLRQQGVDVEPRILIATRLIPESDGTTCDQRLEPVHGAENVQILRVPFRYEDGRIHPHWISRFKVWPYLERYASDLEREVKAELGSRPDVIIGNYSDGNLVATLLSEKLGVTQINVAHALEKSKYLYSDLHWPDHEQDHHFACQFTADLIAMNAADIIITSTYQEIAGNDREVGQYESHQDYTLPGLYRVENGIDVFDSKFNILSPGADPRTYFSYARTEERFSSLWPEIESLLFGREPGPDIRGVLEDRQKPIILSMARMDRIKNLSGLAELYGRSSRLRSLANLVIIGGHVDVQNSMDAEEREEIRRMHEIMDHYQLDGQMRWVGSQLDKTVVGELYRVVADGRGVFVQPALFEAFGLTVIEAMSSGLPVFATRHGGPLEIIEDGVSGFHIDPNDPEATAEKLADFLEAARERPKYWEEISDAALARVSERYTWERWAERWLTWVRCWGFWRFVLSRESQVMERYLQMFRHLQWRPLAHAVPME

SEQ ID NO: 297 - protein, 793 aa, synthetic construct
MIEELRQQLLDSPRSWRAFLRHLVASQRDSWLHTDLQRACKTFREQPPEGYPEDIGWLADFVAHTQEAIFRDPWMVFAWRLRPGVWEYVRIHVEQLAVEELSTDEYLQAKEQLVGLGAEGEAVLTVDFEDFRPVSQRLKDESTIGDGLTHLNRHLAGRIWTDLAAGRSQILEFLGLHRLDNQNLMLSNGNTDFDSLRQTVQYLGTLPRETPWAEFREDMRRRGFEPGWGNTAGRVRETMRLLMDLLDSPSPAALESFLDRIPMISNVLIISIHGWFAQDKVLGRPDTGGQVVYILDQARALEREMRNRLRQQGVDVEPRIIIVTRLIPESDGTTCDQRLEPVHGAENVQILRIPFRYEDGRIHPHWISRFKVWPYLERWVSDVEREVKAELGSRPDLIIGNYSDGNLVATLISEKWGVTQCNIAHALEKSKYLYSDLHWPDHEQDHHFACQFTADLIAMNAADIIVTSTYQEIAGNDREVGQYESHQDYTLPGLYRVENGIDVFDSKFNIVSPGADPRTYFSYARTEERFSSLWPEIESLLFGREPGPDIRGVLEDRQKPIILSMARMDRIKNLSGLAELYGRSSRLRSLANLVIIGGHVDVQNSMDAEEREEIRRMHEIMDHYQLDGQMRWVGSQLDKTVVGELYRVVADGRGVFVQPALFEAFGLTVIEAMSSGLPVFATRHGGPLEIIEDGVSGFHIDPNDPEATAEKLADFLEAARERPKYWEEISDAALARVSERYTWERYAERLMTIARCFGFWRFVLSRESQVMERYLQMFRHLQWRPLAHAVPME

SEQ ID NO: 298 - protein, 793 aa, synthetic construct
MIEELRQQLLDSPRSWRAFLRHLVASQRDSWLHTDLQRACKTFREQPPEGYPEDIGWLADFVAHTQEAIFRDPWMVFAWRLRPGVWEYVRIHVEQLAVEELSTDEYLQAKEQLVGLGAEGEAVLTVDFEDFRPVSQRLKDESTIGDGLTHLNRHLAGRIWTDLAAGRSQILEFLGLHRLDNQNLMLSNGNTDFDSLRQTVQYLGTLPRETPWAEFREDMRRRGFEPGWGNTAGRVRETMRLLMDLLDSPSPAALESFLDRIPMISNVIIISIHGWFAQDKVLGRPDTGGQVVYILDQARALEREMRNRLRQQGVDVEPRILIITRLIPESDGTTCDQRLEPVHGAENVQILRIPFRYEDGRIHPHWISRFKVWPYLERWVSDVEREIKAELGSRPDLIIGNYSDGNLVATLLSEKWGVTQCNIAHALEKSKYLYSDLHWPDHEQDHHFACQFTADLIAMNAADIIVTSTYQEIAGNDREVGQYESHQDYTLPGLYRVENGIDVFDSKFNIVSPGADPRTYFSYARTEERFSSLWPEIESLLFGREPGPDIRGVLEDRQKPIILSMARMDRIKNLSGLAELYGRSSRLRSLANLVIIGGHVDVQNSMDAEEREEIRRMHEIMDHYQLDGQMRWVGSQLDKTVVGELYRVVADGRGVFVQPALFEAFGLTVIEAMSSGLPVFATRHGGPLEIIEDGVSGFHIDPNDPEATAEKLADFLEAARERPKYWEEISDAALARVSERYTWERYAERLMTIARCFGFWRFVLSRESQVMERYLQMFRHLQWRPLAHAVPME

SEQ ID NO: 299 - protein, 793 aa, synthetic construct
MIEELRQQLLDSPRSWRAFLRHLVASQRDSWLHTDLQRACKTFREQPPEGYPEDIGWLADFVAHTQEAIFRDPWMVFAWRLRPGVWEYVRIHVEQLAVEELSTDEYLQAKEQLVGLGAEGEAVWTIDLEDLRPVSQRLKDESTIGDGLTHLNRHLAGRIWTDLAAGRSQILEFLGLHRLDNQNLMLSNGNTDFDSLRQTVQYLGTLPRETPWAEFREDMRRRGFEPGWGNTAGRVRETMRLLMDLLDSPSPAALESFLDRIPMISNVLIVSIHGWFAQDKVLGRPDTGGQVVYILDQARALEREMRNRLRQQGVDVEPRILIATRLIPESDGTTCDQRLEPVHGAENVQILRVPFRYEDGRIHPHWISRFKVWPYLERYASDLEREVKAELGSRPDLIIGNYSDGNLVATLLSEKLGVTQCNIAHALEKSKYLYSDLHWPDHEQDHHFACQFTADWIAMNAADIIVTSTYQEIAGNDREVGQYESHQDYTLPGLYRVENGVDVFDSKFNIVSPGADPRTYFSYARTEERFSSLWPEIESLLFGREPGPDIRGVLEDRQKPIILSMARMDRIKNLSGLAELYGRSSRLRSLANLVIIGGHVDVQNSMDAEEREEIRRMHEIMDHYQLDGQMRWVGSQLDKTVVGELYRVVADGRGVFVQPALFEAFGLTVIEAMSSGLPVFATRHGGPLEIIEDGVSGFHIDPNDPEATAEKLADFLEAARERPKYWEEISDAALARVSERYTWERYAERLMTIARCFGFWRFVLSRESQVMERYLQMIRHLQWRPLAHAVPME

SEQ ID NO: 300 - protein, 808 aa, synthetic construct
MTCVLLKAVVESDERADLRQFLRILQLQEKRYLLRNDILDAFADYCRDQERPVPPPSESRLSKLVFYTQEIIVDNESLCWIVRPRIAQQEVCRLHVEDLTIEPMTIPELLDLRDRLVNHYHPNEGDVFEIDVQPFYDYSPIIRDAKNIGKGVEFLNRYLSSKLFQDPRQWQQNLFNFLRIHRYNGYQLLINERIRSPQHLSEQVKQALVVLSDRPPTEPYSEFRFELQNLGFEPGWGNTVARVRDTLEILDQLLDSPDHQVLEAFVSRIPMIFRIALISPHGWFGQEGVLGRPDTGGQVVYILDQVRSLEKQMREDLELAGLDVLEAQPKIIVLTRLIPNAEGTTCNQRLEKIYGTNDAWILRVPFREFNPKVTQNWISRFEIWPYLETFAIDAERELRAEFGGVPDLIIGNYSDGNLVAFLLARRLKVTQCNIAHALEKSKYLFSNLYWQDLEDKYHFSLQFTADLIAMNAANFIISSTYQEIVGTPDSIGQYESYQSFTMPDLYHVVNGIELFSPKFNVVPPGVNEQVYFPYYHYTERLEGDRQRLEELLFTLEDPQQIYGYLEAPEKRPLFSMARLDRIKNLTGLAEAFGRSKALQERCNLILVAGKLRTADSSDREEIAEIEKLYQIIHQYNLHGKIRWLGIRLPKADSGEIYRIIADRQGIFVQPALFEAFGLTILEAMISGLPTFGTRFGGPLEIIQDGVNGFYINPTHLEEMAETIVRFLEACDRDPQEWQRISKAGIERVYSTYTWKIHCTRLLSLAKIYGFWNFVSQENREDMMRYMEALFHLLYKPRAQALLAEHLQR

SEQ ID NO: 301 - protein, 808 aa, synthetic construct
MTCVLLKAVVESDERADLRQFLRILQLQEKRYLLRNDILDAFADYCRDQEKPVYPPSESRLSKLVFYTQEIIVDNESLCWIVRPRIAQQEVCRLHVEDLTIEPMTIPELLDLRDRLVNHYHPNEGDVFEIDVQPFYDYSPIIRDAKNIGKGVEFLNRYLSSKLFQDPRQWQQNLFNFLRIHRYNGYQLLINERIRSPQQLSEQVKQALKVLSDRPPDEPYSEFRFELQELGFEPGWGNTVARVRDTLEILDQLLDSPDHQVLEAFVSRIPMIFRIALISPHGWFGQEGVLGRPDTGGQVVYILDQVRSLEKQMREDLELAGLDVLEAQPKIIVLTRLIPNAEGTTCNQRLEKIYGTNNAWILRVPFREFNPKVTQNWISRFEIWPYLETFAIDAERELRAEFGGRPDLIIGNYSDGNLVAFLLARRLKVTQCNIAHALEKSKYLFSDLYWQDLEDKYHFSLQFTADLIAMNAANFIISSTYQEIVGTPDSIGQYESYQSFTMPDLYHVVNGIELFSPKFNVVPPGVNEQVYFPYYHYTERLEGDRQRLEELLFTLEDPQQIYGYLEAPEKRPLFSMARLDRIKNLTGLAEAFGRSKALQERCNLILVAGKLRTADSSDREEIAEIEKLYQIIHQYNLHGKIRWLGIRLPKADSGEIYRIIADRQGIFVQPALFEAFGLTILEAMISGLPTFGTRFGGPLEIIQDGVNGFYINPTHLEEMAETIVRFLEACDRDPQEWQRISKAGIERVYSTYTWKIHCTRLLSLAKIYGFWNFVSQENREDMMRYMEALFHLLYKPRAQALLAEHLQR

SEQ ID NO: 302 - protein, 808 aa, synthetic construct
MTCVLLKAVVESDERADLRQFLRILQLQEKRYLLRNDILDAFEDYCRDQEKPVYPPSESRLSKLVFYTQEIIVDEESLCWIVRPRIAQQEVCRLHVEDLTIEPMTIPELLDLRDRLVNHYHPNEGDVFEIDVQPFYDYSPIIRDAKNIGKGVEFLNRYLSSKLFQDPRQWQQNLFNFLRIHRYNGQQLLINERIRSPQQLSEQVKQALKVLSDRPPDEPYSEFRFELQELGFEPGWGNTVARVRDTLEILDQLLDSPDHQVLEAFVSRIPMIFRIALISPHGWFGQEGVLGRPDTGGQVVYILDQVRSLEKQMREDLQLAGLDVLEAQPKIIVLTRLIPNAEGTTCNQRLEKIYGTNNAWILRVPFREFNPKVTQNWISRFEIWPYLETFAIDAERELRAEFGGRPDLIIGNYSDGNLVAFLLARRLKVTQCNIAHALEKSKYLFSDLYWQDLEDKYHFSLQFTADLIAMNAANFIISSTYQEIVGTPDSIGQYESYQSFTMPDLYHVVNGIELFSPKFNVVPPGVNEQVYFPYYHKEERLEGDRQRLEELLFTLEDPQQIYGYLEAPEKRPLFSMARLDRIKNLTGLAEAFGRSKALQERCNLILVAGKLRTADSSDREEIAEIEKLYQIIDQYNLHGKIRWLGIRLPKADSGEIYRIIADRQGIFVQPALFEAFGLTILEAMISGLPTFATRFGGPLEIIQDGVNGFYINPTHLEEMAETIVRFLEKCDRDPQEWQRISKAGIERVYSTYTWKIHTTRLLSLAKIYGFWNFVSQENREDMMRYMEALFHLLYKPRAQALLAEHLQR

SEQ ID NO: 303 - protein, 808 aa, synthetic construct
MTCVLLKAVVESDERADLRQFLRILQLQEKRYLLRNDILDAFEDYCRDQEKPVYPPSESRLSKLVFYTQEIIVDEESLCWIVRPRIAQQEVCRLHVEDLTIEPMTIPELLDLRDRLVNHYHPNEGDVFEIDVQPFYDYSPIIRDPKNIGKGVEFLNRYLSSKLFQDPRQWQQNLFNFLRIHRYNGQQLLINERIRSPQQLSEQVKQALKVLSDRPPDEPYEEFRFELQELGFEPGWGNTVARVRDTLEILDQLLDSPDHQVLEAFVSRIPMIFRIALISPHGWFGQEGVLGRPDTGGQVVYILDQVRSLEKQMREDLQEAGLDVLEAQPKIIVLTRLIPNAEGTTCNQRLEKIYGTNNAWILRVPFREFNPKVTQNWISRFEIWPYLETFAIDAERELRAEFGGRPDLIIGNYSDGNLVAFLLARRLKVTQCNIAHALEKSKYLFSDLYWQDLEDKYHFSLQFTADLIAMNAANFIISSTYQEIVGTPDSIGQYESYQSFTMPDLYHVVNGIELFSPKFNVVPPGVNEQVYFPYYHKEERLEGDRQRLEELLFTLEDPQQIYGYLEAPEKRPLFSMARLDRIKNLTGLAEAYGRSKALQERCNLILVAGKLRTADSSDREEIAEIEKLYQIIDQYNLHGKIRWLGIRLPKADSGEIYRIIADRQGIFVQPALFEAFGLTILEAMISGLPTFATRFGGPLEIIQDGVNGFYINPTHLEEMAETIVRFLEKCDRDPQEWQRISQAAIERVYSTYTWKIHTTRLLSLAKIYGFWNFVSQENREDMMRYMEALFHLLYKPRAQALLAEHLQR

SEQ ID NO: 304 - protein, 808 aa, synthetic construct
MTCVLLKAVVESDERAELRQFLRILRLKEKRYLLRNDILDAFEDYCRDQEKPVYPPSESSLSKLVFYTQEIIVDEESLCWIVRPRIARQEVCRLHVDDLTIEPMTIPELLDLRDRLVNHYHPNEGDVFEIDVQPFYDYSPIIRDPKNIGKGVEFLNRYLSSKLFQDPRQWQQNLFNFLRIHRYNGQQLLINERIRSPQQLSEQVKQALKILSDRPPDEPYEEFRFELQELGFEPGWGNTVARVRDTLEILDQLLDSPDHQVLEAFVSRIPMIFRIALISPHGWFGQEGVLGRPDTGGQVVYILDQVRSLEKQMREDLQEAGLDVLEAQPKIIVLTRLIPNAEGTTCNQRLEKIYGTDNAWILRVPFREFNPKVTQNWISRFEIWPYLETFAIDAERELRAEFGGRPDLIIGNYSDGNLVAFLLARRLKVTQCNIAHALEKSKYLFSDLYWQDLEDKYHFSLQFTADLIAMNAANFIISSTYQEIVGTPDSIGQYESYQSFTMPDLYHVVNGIELFSPKFNVVPPGVNENVYFPYYHKEERLEGDRQRLEELLFTLEDPQQIFGYLEHPEKRPLFSMARLDRIKNLTGLAEAYGRSKELQERCNLILVAGKLRVEDSSDREEIAEIEKLYQIIDQYNLHGKIRWLGIRLPKADSGEIYRIIADRQGIFVQPALFEAFGLTILEAMISGLPTFATRFGGPLEIIQDGVNGFYINPTHLEEMAETIVRFLEKCDRDPQEWQRISQAAIERVRSTYTWKIHTTRLLSLAKIYGFWNYVSQENREDMMRYMEALFHLLYKPRAQALLAEHLQR

SEQ ID NO: 305 - protein, 808 aa, synthetic construct
MTCVLLKAVVESDERADLRQFSRILQLGEKRYLLRNDILDAFADYCRDQERPVPPPSESRLSKLVFYTQEIIVDNESLCWIVRPRIAQQEVCRLHVEDLTIEPMTIPELLDLRDRLVNHYHPNEGDVFEIDVQPFYDYSPIIRDAKNIGKGVEFLNRYLSSKLFQDPRQWQQNLFNFLRIHRYNGYQLLINERIRSPQHLSEQVKQALVVLSDRPPTEAYSEFRFELQNLGFEPGWGNTVARVRDTLEILDQLLDSPDHQVLEAFVSRIPMLFRIALISPHGWFGQEGVLGRPDTGGQVVYILDQVKSLEKQMREDLELAGLDVLEAQPKIIVLTRLIPNAEGTLCNQRLEKIYGTNDAWILRVPFREFNPKVTQNWISRFEIWPYLETFAIDAERELRAEFGHVPDLIIGNYSDGNLVAFLLARRLKVTQCNIAHALEKSKYLFSNLYWQDLEDKYHFSLQFTADLIAMNAANFIISSTYQEIVGTPDSIGQYESYQSFTMPDLYHVVNGIELFSPKFNVVPPGVNEQVYFPYYHYEERLEGDRQRLEELLFTLEDPQQIYGYLEAPEKRPLFSMARLDRIKNLTGLAEAFGRSKALQERCNLILVAGKLRTADSSDREEIAEIEKLYQIIHQYNLHGKIRWLGIRLPKADSGEIYRIIADRQGIFVQPALFEAFGLTILEAMISGLPTFATRFGGPLEIIQDGVNGFYINPTHLEEMAETIVRFLEACDRDPQEWQRISKAGIERVYSTYTWKIHCTRLLSLAKIYGFWNFSSQENREDMMRYMEALFHLLYKPRAQALLAEHLQR

SEQ ID NO: 306 - protein, 808 aa, synthetic construct
MTCVLLKAVVESDERADLRQFSRILQRGEKRYLLRNDILDAFADYCRDQEKPVPPPSESRLSKLVFYTQEIIVDNESLCWIVRPRIAQQEVCRLHVEDLTIEPMTIPELLDLRDRLVNHYHPNEGDVFEIDVQPFYDYSPIIRDAKNIGKGVEFLNRYLSSKLFQDPRQWQQNLFNFLRIHRYNGYQLLINERIRSPQHLSEQVKQALKVLSDRPPDEAYSEFRFELQNLGFEPGWGNTVARVRDTLEILDQLLDSPDHQVLEAFVSRIPMLFRIALISPHGWFGQEGVLGRPDTGGQVVYILDQVRSLEKQMREDLELAGLDVLEAQPKIIVLTRLIPNAEGTLCNQRLEKIYGTNNAWILRVPFREFNPKVTQNWISRFEIWPYLETFAIDAERELRAEFGGRPDLIIGNYSDGNLVAFLLARRLKVTQCNIAHALEKSKYLFSNLYWQDLEDKYHFSLQFTADLIAMNAANFIISSTYQEIVGTPDSIGQYESYQSFTMPDLYHVVNGIELFSPKFNVVPPGVNEQVYFPYYHYEERLEGDRQRLEELLFTLEDPQQIYGYLEAPEKRPLFSMARLDRIKNLTGLAEAFGRSKALQERCNLILVAGKLRTADSSDREEIAEIEKLYQIIHQYNLHGKIRWLGIRLPKADSGEIYRIIADRQGIFVQPALFEAFGLTILEAMISGLPTFATRFGGPLEIIQDGVNGFYINPTHLEEMAETIVRFLEACDRDPQEWQRISKAGIERVYSTYTWKIHCTRLLSLAKIYGFWNFSSQENREDMMRYMEALFHLLYKPRAQALLAEHLQR

SEQ ID NO: 307 - protein, 808 aa, synthetic construct
MTCVLLKAVVESDEREALRQFLRILQRSEKRYLLRNDILDAFADYCRDQEKPAPFPSSSRLSKLIFYTQEIIVDNESLCWIVRPRIAQQEVVRLHVEDLTIEPMTIPELLDARDRLVNHYHPNEGDVFEIDVQPFYDYSPIIRDAKNIGKGVEFLNRYLSSKLFQDPRQWQELLFNFLRIHRYNGQQLLINERIRSPQHLSEQVKQALKVLSDRPPDEAYEEFRFELQELGFEPGWGNTVARVRDTLEILDQLLDSPDHQVLEAFVSRIPMIFRIVLISPHGWFGQEGVLGRPDTGGQVVYILDQVRSLEKQMREDLELAGLDVLEAQPKIIVLTRLIPNAEGTTCNQRLEKIYGTENAWILRVPFREFNPKVTQNWISRFEIWPYLETFAIDAERELRAEFGGRPDLIIGNYSDGNLVAFLLARRLKVTQCNIAHALEKSKYLFSNLYWQDLEDKYHFSLQFTADLIAMNAADFIISSTYQEIVGTPDSIGQYESYQSFTMPDLYHVVNGIELFSPKFNVVPPGVNEEVYFPYYHKERRLEGDRQRLEELLFTLEDPQQIYGYLEAPEKRPLFSMARLDRIKNLTGLAEAFGRSKELQERCNLILVAGKLRTADSSDREEIAEIEKLYQIIEQYNLHGKIRWLGIRLPKADSGEIYRIIADRQGIFVQPALFEAFGLTILEAMISGLPTFATRFGGPLEIIQDGVNGFYINPTHLEEMAETIVRFLEKCDRDPQEWQRISKAAIERVYSTYTWKIHTTRLLSLAKIYGFWNFVSQENREDMMRYMEALFHLLYKPRAQALLAEHLQR

SEQ ID NO: 308 - protein, 808 aa, synthetic construct
MTCVLLKAVVESDEREALRQFLRILQRGEKGYLLRNDILDAFDDYCRDQEKPAPFPSSSSLSKLIRYTQEIIVDNESLCWIVRPRIARQEVVRLHVEDLTIEPMTIPELLDARDRLVNHYHPNEGDVFEIDVQPFYDYSPIIRDPKNIGKGVEFLNRYLSSKLFQDPRQWQELLFNFLRIHRYNGQQLLINERIRSPQHLSEQVKQALKYLSDRPPDEAYEEFRFELQELGFEPGWGNTVARVRETLELLDQLLDSPDHQVLEAFVSRIPMIFRIALISPHGWFGQEGVLGRPDTGGQVVYILDQVRSLEKQMREDLKLAGLDVLEAQPKIIVLTRLIPNAEGTTCNQRLEKIYGTENAWILRVPFREFNPKVTQNWISRFEIWPYLETFAIDAERELRAEFGGRPDLIIGNYSDGNLVAFLLARRLKVTQCNIAHALEKTKYLFSNLYWQDLEDKYHFSLQFTADLIAMNAADFIISSTYQEIVGTPDSIGQYESYQSFTMPDLYHVVNGIELFSPKFNVVPPGVNEEVYFPYYRKERRLESDRQRLEELLFTLEDPQQIYGYLEHPEKRPLFSMARLDRIKNITGLAEAFGRNKELQERCNLILVAGKLRTEDSSDREEIAEIEKLYQIIEQYNLHGKIRWLGIRLPKADSGEIYRIIADRQGIFVQPALFEAFGLTILEAMISGLPTFATRFGGPLEIIQDGVNGFYINPTHLEEMAETIVRFLEKCDRDPQEWQRISQAAIERVRSTYTWKIHTTRLLSLAKIYGFWNFVSQENREDMMRYMEALFHLLYKPRAQALLAEHLQR

SEQ ID NO: 309 - protein, 808 aa, synthetic construct
MTCVLLKAVVESDERADLRQFFRILQLQEKGYLLRNDILDAFADYCRDQERPVPPPSESRLSKLVFYTQEIIVDNESLCWIVRPRIAQQEVYRLHVEDLTIEPMTIPELLDLRDRLVNHYHPNEGDVFEIDVQPFYDYSPIIRDAKNIGKGVEFLNRYLSSKLFQDPRQWQQRLFNFLRIHRYNGYQLLINERIRSPQHLSEQVKQALVVLSDRPPTEAYSEFRFELQNLGFEPGWGNTVARVRDTLEILDQLLDSPDHQVLEAFVSRIPMIFRIALISPHGWFGQEGVLGRPDTGGQVVYILDQVKSLEKQMREDLELAGLDVLEAQPKIIVLTRLIPNAEGTLCNQRLEKIYGTNDAWILRVPFREFNPKVTQNWISRFEIWPYLETFAIDAERELRAEFGHVPDLIIGNYSDGNLVAFLLARRLKVTQCNIAHALEKSKYLFSNLYWQDLEDKYHFSLQFTADLIAMNAANFIISSTYQEIVGTPDSIGQYESYQSFTMPDLYHVVNGIELFSPKFNVVPPGVNEQVYFPYYHYEERLEGDRQRLEELLFTLEDPQQIYGYLEAPEKRPLFSMARLDRIKNLTGLAEAFGRSKALQERCNLILVAGKLRTADSSDREEIAEIEKLYQIIHQYNLHGKIRWLGIRLPKADSGEIYRIIADRQGIFVQPALFEAFGLTILEAMISGLPTFGTRFGGPLEIIQDGVNGFYINPTHLEEMAETIVRFLEACDRDPQEWQRISKAGIERVYSTYTWKIHTTRLLSLAKIYGFWNFVSQENREDMMRYMEALFHLLYKPRAQALLAEHLQR

SEQ ID NO: 310 - protein, 808 aa, synthetic construct
MTCVLLKAVVESDERADLRQFFRILQLQEKGYLLRNDILDAFADYCRDQERPVPPPSESRLSKLVFYTQEIIVDNESLCWIVRPRIAQQEVYRLHVEDLTIEPMTIPELLDLRDRLVNHYHPNEGDVFEIDVQPFYDYSPIIRDAKNIGKGVEFLNRYLSSKLFQDPRQWQQRLFNFLRIHRYNGYQLLINERIRSPQHLSEQVKQALKVLSDRPPDEAYSEFRFELQNLGFEPGWGNTVARVRDTLEILDQLLDSPDHQVLEAFVSRIPMIFRIVLISPHGWFGQEGVLGRPDTGGQVVYILDQVRSLEKQMREDLELAGLEVLEAQPKIIVLTRLIPNAEGTLCNQRLEKIYGTNDAWILRVPFREFNPKVTQNWISRFEIWPYLETFAIDAERELRAEFGGRPDLIIGNYSDGNLVAFLLARRLKVTQCNIAHALEKSKYLFSNLYWQDLEDKYHFSLQFTADLIAMNAANFIISSTYQEIVGTPDSIGQYESYQSFTMPDLYHVVNGIELFSPKFNVVPPGVNEQVYFPYYHYEERLEGDRQRLEELLFTLEDPQQIYGYLEAPEKRPLFSMARLDRIKNLTGLAEAFGRSKALQERCNLILVAGKLRTADSSDREEIAEIEKLYQIIDQYNLHGKIRWLGIRLPKADSGEIYRIIADRQGIFVQPALFEAFGLTILEAMISGLPTFATRFGGPLEIIQDGVNGFYINPTHLEEMAETIVRFLEACDRDPQEWQRISKAGIERVYSTYTWKIHTTRLLSLAKIYGFWNFVSQENREDMMRYMEALFHLLYKPRAQALLAEHLQR

SEQ ID NO: 311 - protein, 808 aa, synthetic construct
MTCVLLKAWWESDERADLRQFFRILQLQEKGYLLRNDILDAFADYCRDQERPVPPPSESRLSKLVFYTQEIIVDNESLCWIVRPRIAQQEVWRLHVEDLTIEPMTIPELLDLRDRLVNHYHPNEGDVFEIDVQPFYDYSPIIRDAKNIGKGVEFLNRYLSSKLFQDPRQWQQRLFNFLRIHRYNGYQLLINERIRSPQHLSEQVKQALKVLSDRPPDEAYEEFRFELQNLGFEPGWGNTVARVRDTLEILDQLLDSPDHQVLEAFVSRIPMIFRIVLISPHGWFGQEGVLGRPDTGGQVVYILDQVRSLEKQMREDLEEAGLDVLEIQPKIIVLTRLIPNAEGTTCNQRLEKIYGTNHAWILRVPFREFNPKVTQNWISRFEIWPYLETFAIDAERELRAEFGGRPDLIIGNYSDGNLVAFLLARRLKVTQCNIAHALEKSKYLFSDLYWQDLEDKYHFSLQFTADLIAMNAADFIISSTYQEIVGTPDSIGQYESYQSFTMPDLYHVVNGIELFSPKFNVVPPGVNEQVYFPYYHKEERLEGDRQRLEELLFTLEDPQQIYGYLEAPEKRPLFSMARLDRIKNLTGLAEAFGRSKALQERCNLILVAGKLRTADSSDREEIAEIEKLYQIIDQYNLHGKIRWLGIRLPKADSGEIYRIIADRQGIFVQPALFEAFGLTILEAMISGLPTFATRFGGPLEIIQDGVNGFYINPTHLEEMAETIVRFLEKCDRDPQEWQRISKAGIERVYSTYTWKIHTTRLLSLAKIYGFWNFVSQENREDMMRYLEALFHLLYKPRAQALLAEHLQR

SEQ ID NO: 312 - protein, 808 aa, synthetic construct
MTCVLLKAVVESDERADLRQFLRILQLQEKGYLLRNDILDAFEDYCRDQERPVPPPSESRLSKLVHYTQEIIVDNESLCWIVRPRIAQQEVWRLHVEDLTIEPMTIPELLDLRDRLVNHYHPNEGDVFEIDVQPFYDYSPIIRDAKNIGKGVEFLNRYLSSKLFQDPRQWQQRLFNFLRIHRYNGYQLLINERIRSPQHLSEQVKQALKVLSDRPPDEPYEEFRFELQNLGFEPGWGNTVARVRDTLEILDQLLDSPDHQVLEAFVSRIPMIFRIVLISPHGWFGQEGVLGRPDTGGQVVYILDQVRSLEKQMREDLEEAGLDVLEIQPKIIVLTRLIPNAEGTTCNQRLEKIYGTNNAWILRVPFREFNPKVTQNWISRFEIWPYLETFAIDAERELRAEFGGRPDLIIGNYSDGNLVAFLLARRLKVTQCNIAHALEKSKYLFSDLYWQDLEDKYHFSLQFTADLIAMNAADFIISSTYQEIVGTPDSIGQYESYQSFTMPDLYHVVNGIELFSPKFNVVPPGVNEEVYFPYYHKERRLEGDRQRLEELLFTLEDPQQIYGYLEAPEKRPLFSMARLDRIKNLTGLAEAFGRSKALQERCNLILVAGKLRTEDSSDREEIAEIEKLYQIIDQYNLHGKIRWLGIRLPKADSGEIYRIIADRQGIFVQPALFEAFGLTILEAMISGLPTFATRFGGPLEIIQDGVNGFYINPTHLEEMAETIVRFLEKCDRDPQEWQRISQAGIERVYSTYTWKIHTTRLLSLAKIYGFWNFVSQENREDMMRYLEALFHLLYKPRAQALLAEHLQR

SEQ ID NO: 313 - protein, 808 aa, synthetic construct
MTCVLLKAWWESDERNALRQFLRILALGEKGYLLRNDILDAFEDYCKDQERPEPPPSSSRLSKLVHYTQEIIVDNESLCFIVRPRIAQQEVCRLHVDDLTIEPMTIPELLDLRDRLVNHYHPNEGDVFEIDVQPFYDYSPIIRDPKNIGKGVEFLNRYLSSKLFQDPRQWQQRLFNFLRIHRYNGVQLLINERIRSPQQLSEQVKQALKVLSDRPPDEPYEEFRFELQNLGFEPGWGNTVARVRDTLEILDQLLDSPDHQVLEAFVSRIPMIFRIVLISPHGWFGQEGVLGRPDTGGQVVYILDQVRSLEKQMREDLEEAGLDVLEIQPKIIVLTRLIPNAEGTTCNQRLEKIYGTNNAWILRVPFREFNPKVTQNWISRFEIWPYLETFAIDAERELRAEFGGRPDLIIGNYSDGNLVAFLLARRLKVTQCNIAHALEKTKYLFSDLYWQDLEDKYHFSLQFTADLIAMNAADFIISSTYQEIVGTPDSIGQYESYQSFTMPDLYHVVNGIELFHPKFNVVPPGVNEEVYFPYYHKERRLESDRQRLEELLFTLEDPQQIYGYLEHPEKRPLFSMARLDRIKNLTGLAEAFGRSPRLQERCNLIIVAGKLRTEDSSDREEIAEIEKLYQIIDQYNLHGKIRWLGIRLPKADSGEIYRIIADRQGIFVQPALFEAFGLTILEAMISGLPTFATRFGGPLEIIQDGVNGFYINPTHLEEMAETIVRFLEKCDRDPQEWQRISQAAIERVYSTYTWKIHTTRLLSLAKIYGFWNFVSQENREDMMRYLEALFHLLYKPRAQALLAEHLQR

SEQ ID NO: 314 - protein, 808 aa, synthetic construct
MTCVLLKAVVESDERADLRQFSRILQLGEKRYLLRNDILDAFADYCRDQERPVPFPSESRLSKLVFYTQEIIVDNESLCWIVRPRIAQQEVCRLHVEDLTIEPMTIPELLDLRDRLVNHYHPNEGDVFEIDVQPFYDYSPIIRDAKNIGKGVEFLNRYLSSKLFQDPRQWQQNLFNFLRIHRYNGIQLLINERIRSPQHLSEQVKQALVVLSDRPPTEAYSEFRFELQNLGFEPGWGNTVARVRDTLEILDQLLDSPDHQVLEAFVSRIPMLFRIALISPHGWFGQEGVLGRPDTGGQVVYILDQVKSLEKQMREDLELAGLDVLEAQPKIIVLTRLIPNAEGTLCNQRLEKIYGTNDAWILRVPFREFNPKVTQNWISRFEIWPYLETFAIDAERELRAEFGGVPDLIIGNYSDGNLVAFLLARRLKVTQCNIAHALEKSKYLFSNLYWQDLEDKYHFSLQFTADLIAMNAADFIISSTYQEIVGTPDSIGQYESYQSFTMPDLYHVVNGIELFSPKFNVVPPGVNEQVYFPYYHYTERLEGDRQRLEELLFTLEDPQQIYGYLEAPEKRPLFSMARLDRIKNLTGLAEAFGRSKALQERCNLILVAGKLRTADSSDREEIAEIEKLYQIIHQYNLHGKIRWLGIRLPKADSGEIYRIIADRQGIFVQPALFEAFGLTILEAMISGLPTFGTRFGGPLEIIQDGVNGFYINPTHLEEMAETIVRFLEACDRDPQEWQRISKAGIERVYSTYTWKIHCTRLLSLAKIYGFWNFSSQENREDMMRYMEALFHLLYKPRAQALLAEHLQR

SEQ ID NO: 315 - protein, 808 aa, synthetic construct
MTCVLLKAVVESDERADLRQFSRILQLGEKRYLLRNDILDAFADYCRDQERPEPFPSESRLSKLVFYTQEIIVDNESLCWIVRPRIAQQEVCRLHVEDLTIEPMTIPELLDLRDRLVNHYHPNEGDVFEIDVQPFYDYSPIIRDAKNIGKGVEFLNRYLSSKLFQDPRQWQQNLFNFLRIHRYNGIQLLINERIRSPQHLSEQVKQALKVLSDRPPDEPYSEFRFELQNLGFEPGWGNTVARVRDTLEILDQLLDSPDHQVLEAFVSRIPMLFRIALISPHGWFGQEGVLGRPDTGGQVVYILDQVRSLEKQMREDLELAGLDVLEAQPKIIVLTRLIPNAEGTLCNQRLEKIYGTNDAWILRVPFREFNPKVTQNWISRFEIWPYLETFAIDAERELRAEFGGVPDLIIGNYSDGNLVAFLLARRLKVTQCNIAHALEKSKYLFSNLYWQDLEDKYHFSLQFTADLIAMNAADFIISSTYQEIVGTPDSIGQYESYQSFTMPDLYHVVNGIELFSPKFNVVPPGVNEQVYFPYYHYEERLEGDRQRLEELLFTLEDPQQIYGYLEAPEKRPLFSMARLDRIKNLTGLAEAFGRSKALQERCNLILVAGKLRTADSSDREEIAEIEKLYQIIHQYNLHGKIRWLGIRLPKADSGEIYRIIADRQGIFVQPALFEAFGLTILEAMISGLPTFGTRFGGPLEIIQDGVNGFYINPTHLEEMAETIVRFLEACDRDPQEWQRISKAGIERVYSTYTWKIHCKRLLSLAKIYGFWNFSSQENREDMMRYMEALFHLLYKPRAQALLAEHLQR

SEQ ID NO: 316 - protein, 808 aa, synthetic construct
MTCVLLKAVVESDERADLRQFSRILQLGEKRYLLRNDILDAFADYCRDQERPEPFPHESRLSKLVFYTQEIIVDNESLCWIVRPRIAQQEVCRLHVEDLTIEPMTIPELLDLRDRLVNHYHPNEGDVFEIDVQPFYDYSPIIRDAKNIGKGVEFLNRYLSSKLFQDPRQWQQNLFNFLRIHRYNGIQLLINERIRSPQHLSEQVKQALKVLSDRPPDEPYSEFRFELQELGFEPGWGNTVARVRDTLEILDQLLDSPDHQVLEAFFSRIPMLFRIALISPHGWFGQEGVLGRPDTGGQVVYILDQVRSLEKQMREDLELAGLDVLEIQPKIIVLTRLIPNAEGTLCNQRLEKIYGTNDAWILRVPFREFNPKVTQNWISRFEIWPYLETFAIDAERELRAEFGGRPDLIIGNYSDGNLVAFLLARRLKVTQCNIAHALEKSKYLFSNLYWQDLEDKYHFSLQFTADLIAMNAADFIISSTYQEIVGTPDSIGQYESYQSFTMPDLYHVVNGIELFSPKFNVVPPGVNEQVYFPYYRYEERLEGDRQRLEELLFTLEDPQQIYGYLEAPEKRPLFSMARLDRIKNLTGLAEAFGRSKALQEKCNLILVAGKLRTADSSDREEIAEIEKLYQIIDQYNLHGKIRWLGIRLPKADSGEIYRIIADRQGIFVQPALFEAFGLTILEAMISGLPTFGTRFGGPLEIIQDGVNGFYINPTHLEEMAETIVRFLEKCDRDPQEWQRISKAGIERVYSTYTWKIHCKRLLSLAKIYGFWNFSSQENREDMMRYMEALFHLLYKPRAQALLAEHLQR

SEQ ID NO: 317 - protein, 808 aa, synthetic construct
MTCVLLKAVVESDERADLRQFIRILQLGEKRYLLRNDILDAFADYCRDQERPEPFPHSSRLSKLVHYTQEIIVDNESLCWIVRPRIAQQEVCRLHVEDLTIEPMTIPELLDLRDRLVNHYHPNEGDVFEIDVQPFYDYSPIIRDPKNIGKGVEFLNRYLSSKLFQDPRQWQQKLFNFLRIHRYNGIQLLINERIRSPQHLSEQVKQALKVLSDRPPDEPYSEFRFELQELGFEPGWGNTVARVRDTLEILDQLLDSPDHQVLEAFVSRIPMLFRIALISPHGWFGQEGVLGRPDTGGQVVYILDQVRSLEKQMREDLELAGLDVLEIQPKIIVLTRLIPNAEGTTCNQRLEKIYGTEDAWILRVPFREFNPKVTQNWISRFEIWPYLETFAIDAERELRAEFGGRPDLIIGNYSDGNLVAFLLARRLKVTQCNIAHALEKTKYLFSNLYWQDLEDKYHFSLQFTADLIAMNAADFIISSTYQEIVGTPDSIGQYESYQSFTMPDLYHVVNGIELFSPKFNVVPPGVNEQVYFPYYRKEERLEGDRQRLEELLFTLEDPQQIYGYLEDPEKRPLFSMARLDRIKNLTGLAEAFGRSKALQERCNLILVAGKLRTEDSSDREEIAEIEKLYQIIDQYNLHGKIRWLGIRLPKADSGEIYRIIADRQGIFVQPALFEAFGLTILEAMISGLPTFATRFGGPLEIIQDGVNGFYINPTHLEEMAETIVRFLEKCDRDPQEWQRISKAAIERVYSTYTWKIHAKRLLSLAKIYGFWNFSSQENREDMMRYMEALFHLLYKPRAQALLAEHLQR

SEQ ID NO: 318 - protein, 808 aa, synthetic construct
MTCVLLKAVVESDERAALRQFIRILDRGEKGYLLRNDILDAFADYCRDQERPAPFYHSSRLSKLVHYTQEIIVDNESLCWIVRPRIARQEVVRLHVEDLTIEPMTIPELLDLRDRLVNHYHPNEGDVFEIDVQPFYDYSPIIRDPKNIGKGVEFLNRYLSSKLFQDPRQWQQRLFNFLRIHRYNGIQLLINERIRSPQHLSEQVKQALKVLSDRPPDEPYEEFRFELQELGFEPGWGNTVARVRETLEILDQLLDSPDHQVLEAFLSRIPMIFRIALISPHGWFGQEGVLGRPDTGGQVVYILDQVRALEKQMREDLELAGLDVLEIQPKIIVLTRLIPNAEGTTCNQRLEKIYGTENAWILRVPFREFNPKVTQNWISRFEIWPYLETFAIDAERELRAEFGGRPDLIIGNYSDGNLVAFLLARRLKVTQCNIAHALEKTKYLFSDLYWQDLEDKYHFSLQFTADLIAMNAADFIISSTYQEIVGTPDSIGQYESYQSFTMPDLYHVVNGIELFSPKFNVVPPGVNEQVYFPYTRKERRLESDRQRLEELLFTLEDPQQIVGYLEDPEKRPLFSMARLDRIKNLTGLAEAFGRSKELQEHCNLILVAGKLRTEDSSDREEIAEIEKLYQIIDQYNLHGKIRWLGIRLPKADSGEIYRIIADRQGIFVQPALFEAFGLTILEAMISGLPTFATRFGGPLEIIQDGVNGFYINPTHLEEMAETIVRFLEKCDRDPQEWQRISQAAIERVYSTYTWKIHAKRLLSLAKIYGFWNFSSQENREDMMRYMEALFHLLYKPRAQALLAEHLQR

SEQ ID NO: 319 - protein, 808 aa, synthetic construct
MTCVLLKAVVESDERADLRQFSRILQLGEKRYLLRNDILDAFEDYCRDQERPEPPPSESRLSKLVFYTQEIIVDNESLCWIVRPRIAQQEVYRLHVEDLTIEPMTIPELLDLRDRLVNHYHPNEGDVFEIDVQPFYDYSPIIRDAKNIGKGVEFLNRYLSSKLFQDPRQWQQNLFNFLRIHRYNGYQLLINERIRSPQHLSEQVKQALVVLSDRPPTEPYSEFRFELQNLGFEPGWGNTVARVRDTLEILDQLLDSPDHQVLEAFVSRIPMIFRIALISPHGWFGQEGVLGRPDTGGQVVYILDQVRSLEKQMREDLELAGLGVLEAQPKIIVLTRLIPNAEGTLCNQRLEKIYGTNDAWILRVPFREFNPKVTQNWISRFEIWPYLETFAIDAERELRAEFGHVPDLIIGNYSDGNLVAFLLARRLKVTQCNIAHALEKSKYLFSNLYWQDLEDKYHFSLQFTADLIAMNAANFIISSTYQEIVGTPDSIGQYESYQSFTMPDLYHVVNGIELFSPKFNVVPPGVNEQVYFPYYHYEERLEGDRQRLEELLFTLEDPQQIYGYLEDPEKRPLFSMARLDRIKNLTGLAEAFGRSKALQERCNLILVAGKLRTADSSDREEIAEIEKLYQIIDQYNLHGKIRWLGIRLPKADSGEIYRIIADRQGIFVQPALFEAFGLTILEAMISGLPTFATRFGGPLEIIQDGVNGFYINPTHLEEMAETIVRFLEACDRDPQEWQRISKAGIERVYSTYTWKIHCTRLLSLAKIYGFWNFSSQENREDMMRYMEALFHLLYKPRAQALLAEHLQR

SEQ ID NO: 320 - protein, 808 aa, synthetic construct
MTCVLLKAVVESDEREDLRQFLRILQLGEKRYLLRNDILDAFEDYCRDQERPEPPPSESRLSKLVFYTQEIIVDNEWLCWIVRPRIAQQEVYRLHVEDLTIEPMTIPELLDLRDRLVNHYHPNEGDVFEIDVQPFYDYSPIIRDAKNIGKGVEFLNRYLSSKLFQDPRQWQQNLFNFLRIHRYNGQQLLINERIRSPQQLSEQVKQALKVLSDRPPDEPYSEFRFELQNLGFEPGWGNTVARVRDTLEILDQLLDSPDHQVLEAFVSRIPMIFRIALISPHGWFGQEGVLGRPDTGGQVVYILDQVRSLEKQMREDLELAGLGVLEAQPKIIVLTRLIPNAEGTLCNQRLEKIYGTNDAWILRVPFREFNPKVTQNWISRFEIWPYLETFAIDAERELRAEFGHVPDLIIGNYSDGNLVAFLLARRLKVTQCNIAHALEKSKYLFSNLYWQDLEDKYHFSLQFTADLIAMNAANFIISSTYQEIVGTPDSIGQYESYQSFTMPDLYHVVNGIELFSPKFNVVPPGVNEQVYFPYYHYEERLEGDRQRLEELLFTLEDPQQIYGYLENPEKRPLFSMARLDRIKNLTGLAEAFGRSKALQERCNLILVAGKLRTADSSDREEIAEIEKLYQIIDQYNLHGKIRWLGIRLPKADSGEIYRIIADRQGIFVQPALFEAFGLTILEAMISGLPTFATRFGGPLEIIQDGVNGFYINPTHLEEMAETIVRFLEACDRDPQEWQRISKAGIERVYSTYTWKIHCTRLLSLAKIYGFWNFSSQENREDMMRYMEALFHLLYKPRAQALLAEHLQR

SEQ ID NO: 321 - protein, 808 aa, synthetic construct
MTCVLLKAVVESDEREDLRQFLRILQLGEKRYLLRNDILDAFEDYCRDQERPEPPPSESRLSKLVFYTQEIIVDNEWLCWIVRPRIAQQEVYRLHVEDLTIEPMTIPELLDLRDRLVNHYHPNEGDVFEIDVQPFYDYSPIIRDPKNIGKGVEFLNRYLSSKLFQDPRQWQENLFNFLRIHRYNGQQLLINDRIRSPQQLSEQVKQALKVLSDRPPDEPYSEFRFELQNLGFEPGWGNTVARVRDTLEILDQLLDSPDHQVLEAFLSRIPMIFRIALISPHGWFGQEGVLGRPDTGGQVVYILDQVRSLEKQMREDLELAGLGVLEAQPKIIVLTRLIPNAEGTLCNQRLEKIYGTNNAWILRVPFREFNPKVTQNWISRFEIWPYLETFAIDAERELRAEFGGVPDLIIGNYSDGNLVAFLLARRLKVTQCNIAHALEKSKYLFSNLYWQDLEDKYHFSLQFTADLIAMNAADFIISSTYQEIVGTPDSIGQYESYQSFTMPDLYHVVNGIELFSPKFNVVPPGVNEQVYFPYYHKEERLEGDRQRLEELLFTLEDPQQIYGYLENPEKRPLFSMARLDRIKNLTGLAEAFGRSKALQERCNLILVAGKLRTADSSDREEIAEIEKLYQIIDQYNLHGKIRWLGIRLPKADSGEIYRIIADRQGIFVQPALFEAFGLTILEAMISGLPTFATRFGGPLEIIQDGVNGFHINPTHLEEMAETIVRFLEKCDRDPQEWQRISEAGIERVYSTYTWKIHAKRLLSLAKIYGFWNFSSQENREDMMRYMEALFHLLYKPRAQALLAEHLQR

SEQ ID NO: 322 - protein, 808 aa, synthetic construct
MTCVLLKAVLESDEREDLRQFLRILQLSEKGYLLRNDILDAFEDYCRDQERPEPPYSESRLSKLVFYTQEIIVDNEWLCWIVRPRIAQQEVYRLHVEDLTIEPMTIPELLDLRDRLVNHYHPNEGDVFEIDVQPFYDYSPIIRDPKNIGRGVEFLNRYLSSKLFQDPRQWQENLFNFLRIHRYNGQQLLINDRIRSPQQLSEQVKQALKVLSDRPPDEPYEEFRFELQELGFEPGWGNTVARVRDTLEILDQLLDSPDHQVLEAFLSRIPMIFRIALISPHGWFGQEGVLGRPDTGGQVVYILDQVRALEKQMREDLKLAGLGVLEAQPKIIVLTRLIPNAEGTLCNQRLEKIYGTENAWILRVPFREFNPKVTQNWISRFEIWPYLETFAIDAERELRAEFGGRPDLIIGNYSDGNLVAFLLARRLKVTQCNIAHALEKTKYLFSNLYWQDLEDKYHFSLQFTADLIAMNAADFIISSTYQEIVGTPDSIGQYESYQSFTMPDLYHVVNGIELFSPKFNVVPPGVNENVYFPYYHKEERLEGDRQRLEELLFTLEDPQQIYGYLENPEKRPLFSMARLDRIKNLTGLAEAFGRSKELQERCNLILVAGKLRTEDSTDREEIAEIEKLYQIIDQYNLHGKIRWLGIRLPKADSGEIYRIIADRQGIFVQPALFEAFGLTILEAMISGLPTFATRFGGPLEIIQDGVNGFHINPTHLEEMAETIVRFLEKCDRDPQEWQRISQAGIERVYSTYTWKIHAKRLLSLAKIYGFWNFSSQENREDMMRYMEALFHLLYKPRAQALLAEHLQR

SEQ ID NO: 323 - protein, 808 aa, synthetic construct
MTCVLLKAVVESDERADLRQFLRILQLGEKRYLLRNDILDAFADYCRDQERPVPPPHESRLSKLVFYTQEIIVDNESLWWIVRPRIAQQEVCRLLVEDLTIEPMTIPELLDLRDRLVNHYHPNEGDVFEIDVQPFYDYSPIIRDAKNIGKGVEFLNRYLSSKLFQDPRQWQQNLFNFLRIHRYNGQQLLINERIRSPQHLSEQVKQALVVLSDRPPTEAYSEFRFELQNLGFEPGWGNTVARVRDTLEILDQLLDSPDHQVLEAFVSRIPMLFRIALISPHGWFGQEGVLGRPDTGGQVVYILDQVKSLEKQMREDLELAGLGVLEAQPKIIVLTRLIPNAEGTLCNQRLEKIYGTNHAWILRVPFREFNPKVTQNWISRFEIWPYLETFAIDAERELRAEFGHVPDLIIGNYSDGNLVAFLLARRLKVTQCNIAHALEKSKYLFSNLYWQDLEDKYHFSLQFTADLIAMNAANFIISSTYQEIVGTPDSIGQYESYQSFTMPDLYHVVNGIELFSPKFNVVPPGVNEQVYFPYYHYTERLEGDRQRLEELLFTLEDPQQIYGYLENPEKRPLFSMARLDRIKNLTGLAEAFGRSKALQERCNLILVAGKLRTADSSDREEIAEIEKLYQIIHQYNLHGKIRWLGIRLPKADSGEIYRIIADRQGIFVQPALFEAFGLTILEAMISGLPTFGTRFGGPLEIIQDGVNGFYINPTHLEEMAEKIVRFLEACDRDPQEWQRISKAGIERVYSTYTWKIHCTRLLSLAKIYGFWNFVSQENREDMMRYMEALFHLLYKPRAQALLAEHLQR

SEQ ID NO: 324 - protein, 808 aa, synthetic construct
MTCVLLKAVVESDERADLRQFLRILQLGEKRYLLRNDILDAFADYCRDQERPVPPPHESRLSKLVFYTQEIIVDNESLWWIVRPRIAQQEVCRLLVEDLTIEPMTIPELLDLRDRLVNHYHPNEGDVFEIDVQPFYDYSPIIRDPKNIGKGVEFLNRYLSSKLFQDPRQWQQNLFNFLRIHRYNGQQLLINERIRSPQQLSEQVKQALKWLSDRPPTEAYSEFRFELQNLGFEPGWGNTVARVRDTLEILDQLLDSPDHQVLEAFVSRIPMIFRIALISPHGWFGQEGVLGRPDTGGQVVYILDQVKSLEKQMREDLELAGLDVLEAQPKIIVLTRLIPNAEGTLCNQRLEKIYGTNHAWILRVPFREFNPKVTQNWISRFEIWPYLETFAIDAERELRAEFGHVPDLIIGNYSDGNLVAFLLARRLKVTQCNIAHALEKSKYLFSNLYWQDLEDKYHFSLQFTADLIAMNAANFIISSTYQEIVGTPDSIGQYESYQSFTMPDLYHVVNGIELFSPKFNVVPPGVNEQVYFPYYHYTERLEGDRQRLEELLFTLEDPQQIYGYLENPEKRPLFSMARLDRIKNLTGLAEAFGRSKALQERCNLILVAGKLRTADSSDREEIAEIEKLYQIIDQYNLHGKIRWLGIRLPKADSGEIYRIIADRQGIFVQPALFEAFGLTILEAMISGLPTFGTRFGGPLEIIQDGVNGFYINPTHLEEMAEKIVRFLEACDRDPQEWQRISKAGIERVYSTYTWKIHCTRLLSLAKIYGFWNFVSQENREDMMRYMEALFHLLYKPRAQALLAEHLQR

SEQ ID NO: 325 - protein, 808 aa, synthetic construct
MTCVLLKAVVESDERADLRQFLRILQLGGKRYLLRNDILDAFADYCRDQERPVPPPHESRLSKLVFYTQEIIVDNESLWWIVRPRIAQQEVCRLHVEDLTIEPMTIPELLDLRDRLVNHYHPNEGDVFEIDVQPFYDYSPIIRDPKNIGKGVEFLNRYLSSKLFQDPRQWQQNLFNFLRIHRYNGQQLLINERIRSPQQLSEQVKQALKWLSDRPPDEPYSEFRFELQNLGFEPGWGNTVARVRDTLEILDQLLDSPDHQVLEAFVSRIPMIFRIALISPHGWFGQEGVLGRPDTGGQVVYILDQVKSLEKQMREDLELAGLDVLEAQPKIIVLTRLIPNAEGTRCNQRLEKIYGTNHAWILRVPFREFNPKVTQNWISRFEIWPYLETFAIDAERELRAEFGHVPDLIIGNYSDGNLVAFLLARRLKVTQCNIAHALEKSKYLFSNLYWQDLEDKYHFSLQFTADLIAMNAANFIISSTYQEIVGTPDSIGQYESYQSFTMPDLYHVVNGIELFSPKFNVVPPGVNEQVYFPYYETERRLEGDRQRLEELLFTLEDPQQIYGYLENPEKRPLFSMARLDRIKNLTGLAEAFGRSKALQERCNLILVAGKLRTADSSDREEIAEIEKLYQIIDQYNLHGKIRWLGIRLPKADSGEIYRIIADRQGIFVQPALFEAFGLTILEAMISGLPTFGTRFGGPLEIIQDGVNGFYINPTHLEEMAEKIVRFLEACDRDPQEWQRISKAGIERVYSTYTWKIHCTRLLSLAKIYGFWNFVSQENREDMWRYLEALFHLLYKPRAQALLAEHLQR

SEQ ID NO: 326 - protein, 808 aa, synthetic construct
MTCVLLKAMWESDEREDLRQFLRILQAGGKRYLLRNDILDAFADYCRDQERPVPPPHESRLAKLVYYTQEIIVDNESLWWIVRPRIAQQEVCRLHVEDLTVEPMTIPELLDLRDRLVNHYHPNEGDVFEIDVQPFYDYFPHIRDPKNIGKGVEFLNRYLSSKLFQDPRQWQQKLFNFLRIHRYNGQQLLINERIRSPQQLSEQVKQALKWLSDRPPDEPYEEFRFELQNLGFEPGWGKTVARVRETLEILLQLLDSPDHQVLEAFLSRIPMIFRIALISPHGWFGQENVLGRPDTGGQVVYILDQVRALEKQMREDLELAGLDVLEAQPKIIVLTRLIPNAEGTTCNQRLEKIYGTDHAWILRVPFREFNPKVTQNWISRFEIWPYLETFAIDAERELRAEFGHVPDLIIGNYSDGNLVAFLLARRLKVTQCNIAHALEKSKYLFSNLYWQDLEDKYHFSLQFTADLIAMNAADFIISSTYQEIVGTPDSIGQYESYQSFTMPDLYHVVNGIELFSPKFNVVPPGVNEEVYFPYYETERRLEGDRQRLEELLFTLEDPQQIFGYLENPEKRPLFSMARLDRIKNLTGLAEAFGRNKALQERCNLILVAGYLRTADSSDREEIAEIEKLYQIIDQYNLHGKIRWLGIRLPKADSGEIYRIIADRQGIFVQPALFEAFGLTILEAMISGLPTFGTQFGGPLEIIQDGVNGFYINPTHLEETAEKIVRFLEACDKDPQEWQRISQAAIERVYETYTWKIHTERLLTLAKIYGFWNFVSQENREDMLRYLEALFHLLYKPRAQALLAEHLQR

SEQ ID NO: 327 - protein, 808 aa, synthetic construct
MTCVLLKAVVESDERADLRQFSRILQLGEKRYLLRNDILDAFADYCRDQERPVPPPSESRLSKLVFYTQEIIVDNESLCWIVRPRIAQQEVCRLHVEDLTIVPMTIPELLDLRDRLVNHYHPNEGDVFEIDVQPFYDYSPIIRDPKNIGKGVEFLNRYLSSKLFQDPRQWQQNLFNFLRIHRYNGYQLLINERIRSPQHLSEQVKQALVVLSDRPPTEAYSEFRFELQNLGFEPGWGNTVARVRDTLEILDQLLDSPDHQVLEAFLSRIPMLFRIALISPHGWFGQEGVLGRPDTGGQVVYILDQVKSLEKQMREDLELAGLEVLEAQPKIIVLTRLIPNAEGTRCNQRLEKIYGTNDAWILRVPFREFNPKVTQNWISRFEIWPYLETFAIDAERELRAEFGHVPDLIIGNYSDGNLVAFLLARRLKVTQCNIAHALEKSKYLFSNLYWQDLEDKYHFSLQFTADLIAMNAANFIISSTYQEIVGTPDSIGQYESYQSFTMPDLYHVVNGIELFSPKFNVVPPGVNEQVYFPYYHYTERLEGDRQRLEELLFTLEDPQQIYGYLENPEKRPLFSMARLDRIKNLTGLAEAFGRSKALQERCNLILVAGKLRTADSSDREEIAEIEKLYQIIHQYNLHGKIRWLGIRLPKADSGEIYRIIADRQGIFVQPALFEAFGLTILEAMISGLPTFGTRFGGPLEIIQDGVNGFYINPTHLEEMAETIVRFLEACDRDPQEWQRISKAGIERVYSTYTWKIHCTRLLSLAKIYGFWNFSSQENREDMMRYMEALFHLLYKPRAQALLAEHLQR

SEQ ID NO: 328 - protein, 808 aa, synthetic construct
MTCVLLKAVVESDERADLRQFSRILQLGEKRYLLRNDILDAFADYCRDQERPVPPPSESRLSKLVFYTQEIIVDNESLCWIVRPRIAQQEVCRLHVEDLTIEPMTIPELLDLRDRLVNHYHPNEGDVFEIDVQPFYDYSPIIRDPKNIGKGVEFLNRYLSSKLFQDPRQWQQNLFNFLRIHRYNGQQLLINERIRSPQHLSEQVKQALKVLSDRPPTEAYSEFRFELQNLGFEPGWGNTVARVRDTLEILDQLLDSPDHQVLEAFLSRIPMLFRIALISPHGWFGQEGVLGRPDTGGQVVYILDQVKSLEKQMREDLELAGLDVLEAQPKIIVLTRLIPNAEGTRCNQRLEKIYGTNDAWILRVPFREFNPKVTQNWISRFEIWPYLETFAIDAERELRAEFGHVPDLIIGNYSDGNLVAFLLARRLKVTQCNIAHALEKSKYLFSNLYWQDLEDKYHFSLQFTADLIAMNAANFIISSTYQEIVGTPDSIGQYESYQSFTMPDLYHVVNGIELFSPKFNVVPPGVNEQVYFPYYHYTERLEGDRQRLEELLFTLEDPQQIYGYLENPEKRPLFSMARLDRIKNLTGLAEAFGRSKALQERCNLILVAGKLRTADSSDREEIAEIEKLYQIIHQYNLHGKIRWLGIRLPKADSGEIYRIIADRQGIFVQPALFEAFGLTILEAMISGLPTFGTRFGGPLEIIQDGVNGFYINPTHLEEMAETIVRFLEACDRDPQEWQRISKAGIERVYSTYTWKIHCTRLLSLAKIYGFWNFSSQENREDMMRYMEALFHLLYKPRAQALLAEHLQR

SEQ ID NO: 329 - protein, 808 aa, synthetic construct
MTCVLLKAVVESDERADLRQFIRILQLGEKRYLLRNDILDAFADYCRDQERPVPPPSESRLSKLVFYTQEIIVDNESLCWIVRPRIAQQEVCRLHVEDLTIEPMTIPELLDLRDRLVNHYHPNEGDVFEIDVQPFYDYSPIIRDPKNIGKGVEFLNRYLSSKLFQDPRQWQQNLFNFLRIHRYNGQQLLINERIRSPQHLSEQVKQALKVLSDRPPDEAYSEFRFELQNLGFEPGWGNTVARVRDTLEILDQLLDSPDHQVLEAFLSRIPMLFRIALISPHGWFGQEGVLGRPDTGGQVVYILDQVKSLEKQMREDLELAGLDVLEAQPKIIVLTRLIPNAEGTRCNQRLEKIYGTENAWILRVPFREFNPKVTQNWISRFEIWPYLETFAIDAERELLAEFGHVPDLIIGNYSDGNLVAFLLARRLKVTQCNIAHALEKSKYLFSNLYWQDLEDKYHFSLQFTADLIAMNAANFIISSTYQEIVGTPDSIGQYESYQSFTMPDLYHVVNGIELFSPKFNVVPPGVNEQVYFPYYHYTERLEGDRQRLEELLFTLEDPQQIYGNLENPEKRPLFSMARLDRIKNLTGLAEAFGRSKALQERCNLILVAGKLRTADSSDREEIAEIEKLYQIIHQYNLHGKIRWLGIRLPKADSGEIYRIIADRQGIFVQPALFEAFGLTILEAMISGLPTFGTRFGGPLEIIQDGVNGFYINPTHLEEMAETIVRFLEACDKDPQEWQRISKAGIERVYSTYTWKIHCTRLLSLAKIYGFWNFSSQENREDMMRYMEALFHLLYKPRAQALLAEHLQR

SEQ ID NO: 330 - protein, 808 aa, synthetic construct
MTCVLLKAVVESDERNDLRQFIRILQLSEKRYLLRNDILDAFADYCRDQERPVPPPSESRLSKLVYYTQEIIVDNESLCWIVRPRIAQQEVCRLHVEDLTIEPMTIPELLDLRDRLVNHYHPNEGDVFEIDVQPFYDYSPKIRDPKNIGKGVEFLNRYLSSKLFQDPRQWQENLFDFLRIHRYNGQQLLINERIRSPQHLSEQVKQALKVLSDRPPDEAYEEFRFELQNLGFEPGWGRTVARVRDTLEILDQLLDSPDHQVLEAFLSRIPMIFRIALISPHGWFGQEGVLGRPDTGGQVVYILDQVRSLEKQMREDLELAGLDVLEAQPKIIVLTRLIPNAEGTTCNQRLEKIYGTENAWILRVPFREFNPKVTQNWISRFEIWPYLETFAIDAERELLAEFGGVPDLIIGNYSDGNLVAFLLARRLKVTQCNIAHALEKSKYLFSNLYWQDLEDKYHFSLQFTADLIAMNAADFIISSTYQEIVGTPDSIGQYESYQSFTMPDLYHVVNGIELFHPKFNVVPPGVNEQVYFPYYHKTERLEGDRQRLEELLFTLEDPQQIYGNLENPEKRPLFSMARLDRIKNLTGLAEAFGRSKALQERCNLILVAGKLRTADSSDREEIAEIEKLYQIIDQYNLHGKIRWLGIRLPKADSGEIYRIIADRQGIFVQPALFEAFGLTILEAMISGLPTFATQFGGPLEIIQDGVNGFYINPTHLEEMAETIVRFLEACDKDPQEWQRISQAAIERVYSTYTWKIHTTRLLSLAKIYGFWNFTSQENREDMMRYLEALFHLLYKPRAQALLAEHLQR

SEQ ID NO: 331 - protein, 808 aa, synthetic construct
MTCVLLKAVVESDHRNDLRQFIRILQASEKRYLLRNDILDAFADYCRDQERPVPPPSESRLSKLVYYTQEIIVDNESLCWIVRPRIAQQEVCRLHVEDLTFEPMTIPELLDFRDRLVNHYHPNEGDVFEIDVQPFYDYSPKIRDPKNIGKGVEFLNRYLSSKLFQDPRQWQENLFDFLRIHRYNGQQLLINERIRSPQHLSEQVKQALKYLSDRPPDEPYEEFRFELQNLGFEPGWGNTVARVRETLEILAQLLDSPDHQVLEAFLSRIPMIFRIALISPHGWFGQEGVLGRPDTGGQVVYILDQVRALERQMREDLQLAGLDWLEAQPKIIVLTRLIPNAEGTTCNQRLEKIYGTENAWILRVPFREFNPKVTQNWISRFEIWPYLETFAIDAERELLAEFGGVPDLIIGNYSDGNLVAFLLARRLKVTQCNIAHALEKSKYLFSNLYWQDLEDKYHFSLQFTADLIAMNAADFIISSTYQEIVGTPDSIGQYESYQSFTMPDLYHVVNGIELFHPKFNVVPPGVNEQVYFPYYHKTERLEGDRQRLEELLFTLEDPQQIFGNLSNPEKRPLFSMARLDRIKNLTGLAEAFGRSKALQERCNLILVAGKLRTADSSDREEIAEIEKLYQIIDQYNLHGKIRWLGIRLPKADSGEIYRIIADRQGIFVQPALFEAFGLTILEAMISGLPTFATQFGGPLEIIQDGVNGFYINPTHLEEMAEKIVRFLEACDKDPQEWQRISQAAIERVYETYTWKIHTERLLSLAKIYGFWNFTSQENREDMMRYLEALFHLLYKPRAQALLAEHLQR

SEQ ID NO: 332 - protein, 808 aa, synthetic construct
MTCVLLKAVVESDERADLRQFLRILQLGEKRYLLRNDILDAFADYCRDQERPVPPPSSSRLSKLVFYTQEIIVDNESLCWIVRPRIAQQEVCRLLVEDLTIEPMTIPELLDLRDRLVNHYHPNEGDVFEIDVQPFYDYSPIIRDAKNIGKGVEFLNRYLSSKLFQDPRQWQQNLFNFLRIHRYNGYQLLINERIRSPQHLSEQVKQALVVLSDRPPTEAYSEFRFELQNLGFEPGWGNTVARVRETLELLDQLLDSPDHQVLEAFLSRIPMLFRIALISPHGWFGQEGVLGRPDTGGQVVYILDQVKSLEKQMREDLELAGLGVLEAQPKIIVLTRLIPNAEGTLCNQRLEKIYGTNDAWILRVPFREFNPKVTQNWISRFEIWPYLETFAIDAERELRAEFGGVPDLIIGNYSDGNLVAFLLARRLKVTQCNIAHALEKSKYLFSNLYWQDLEDKYHFSLQFTADLIAMNAANFIISSTYQEIVGTPDSIGQYESYQSFTMPDLYHVVNGIELFSPKFNVVPPGANEQVYFPYTHYTRRLEGDRQRLEELLFTLEDPQQIYGYLENPEKRPLFSMARLDRIKNLTGLAEAFGRSKALQERCNLILVAGKLRTADSSDREEIAEIEKLYQIIHQYNLHGKIRWLGIRLPKADSGEIYRIIADRQGIFVQPALFEAFGLTILEAMISGLPTFGTRFGGPLEIIQDGVNGFYINPTHLEEMAEKIVRFLEHCDRDPQEWQRISKAGIERVYSTYTWKIHCTRLLSLAKIYGFWNFSSQENREDMMRYMEALFHLLYKPRAQALLAEHLQR

SEQ ID NO: 333 - protein, 808 aa, synthetic construct
MTCVLLKAVVESDERADLRQFLRILQLGEKRYLLRNDILDAFADYCRDQERPVPPPSSSRLSKLVFYTQEIIVDNESLCWIVRPRIAQQEVCRLLVEDLTIEPMTIPELLDLRDRLVNHYHPNEGDVFEIDMQPFYDYSPIIRDAKNIGKGVEFLNRYLSSKLFQDPRQWQQNLFNFLRIHRYNGYQLLINERIRSPQHLSEQVKQALKVLSDRPPDEAYSEFRFELQNLGFEPGWGNTVARVRETLELLDQLLDSPDHQVLEAFLSRIPMLFRIALISPHGWFGQEGVLGRPDTGGQVVYILDQVKSLEKQMREDLELAGLGVLEAQPKIIVLTRLIPNAEGTLCNQRLEKIYGTNDAWILRVPFREFNPKVTQNWISRFEIWPYLETFAIDAERELRAEFGGVPDLIIGNYSDGNLVAFLLARRLKVTQCNIAHALEKSKYLFSNLYWQDLEDKYHFSLQFTADLIAMNAANFIISSTYQEIVGTPDSIGQYESYQSFTMPDLYHVVNGIELFSPKFNVVPPGANEQVYFPYTHYTRRLEGDRQRLEELLFTLEDPQQIYGYLENPEKRPLFSMARLDRIKNLTGLAEAFGRSKALQERCNLILVAGKLRTADSSDREEIAEIEKLYQIIHQYNLHGKIRWLGIRLPKADSGEIYRIIADRQGIFVQPALFEAFGLTILEAMISGLPTFGTRFGGPLEIIQDGVNGFYINPTHLEEMAEKIVRFLEHCDRDPQEWQRISKAGIERVYSTYTWKIHCTRLLSLAKIYGFWNFSSQENREDMMRYMEALFHLLYKPRAQALLAEHLQR

SEQ ID NO: 334 - protein, 808 aa, synthetic construct
MTCVLLKAVVESDERADLRQFLRILQLSEKRYLLRNDILDAFADYCRDQEKPEPPPSSSRLSKLVHYTQEIIVDNESLCWIVRPRIAQQEVCRLHVEDLTIEPMTIPELLDLRDRLVNHYHPNEGDVFEIDMQPFYDYFPIIRDPKNIGKGVEFLNRYLSSKLFQDPRQWQENLFNFLRVHRYNGQQLLINERIRSPQHLSEQVKQALKVLSDRPPDEAYSEFRFELQNLGFEPGWGNTVARVRETLELLAQLLDSPDHQVLEAFLSRIPMIFRIALISPHGWFGQEGVLGRPDTGGQVVYILDQVKSLEKQMREDLELAGLGVLEAQPKIIVLTRLIPNAEGTRCNQRLEKIYGTNDAWILRVPFREFNPKVTQNWISRFEIWPYLETFAIDAERELRAEFGGVPDLIIGNYSDGNLVAFLLARRLKVTQCNIAHALEKSKYLFSNLYWQDLEDKYHFSLQFTADLIAMNAANFIISSTYQEIVGTPDSIGQYESYQSFTMPDLYRVVNGIELFSPKFNVVPPGANEQVYFPYTHYTRRLEGDRQRLEELLFTLEDPQQIYGYLENPEKRPLFSMARLDRIKNLTGLAEAFGKSKALQERCNLILVAGKLRTADSSDREEIAEIEKLHQIIKQYNLHGKIRWLGIRLPKADSGEIYRIIADRQGIFVQPALFEAFGLTILEAMISGLPTFGTRFGGPLEIIQDGVNGFYINPTHLEEMAKKIVRFLEQCDRDPQHWQRISKAGIERVYSKYTWKIHCTRLLSLAKIYGFWNFVSQENREDMMRYMEALFHLLYKPRAQALLAEHLQR

SEQ ID NO: 335 - protein, 808 aa, synthetic construct
MTCVLLKAVVESDERNDLRQFLRILQLSGKRYLLRNDILDAFADYCRDQEKPEPPPSSSRLSKLVHYTQEIIVDNESLCWIVRPRIAQQEVCRLHVEDLTIEPMTIPELLDLRDRLVNHYHPNEGDVFEIDMQPFYDYFPIIRDPKNIGKGVEFLNRYLSSKLFQDPRQWQENLFNFLRVHRYNGQQLLINERIRSPQHLSEQVKQALKVLSDRPPDEAYSEFRFELQNLGFEPGWGNTVARVRETLELLAQLLDSPDHQVLEAFLSRIPMIFRIVLVSPHGWFGQEGVLGRPDTGGQVVYILDQVKSLEKQMREDLELAGLGVLEAQPKIIVLTRLIPNAEGTRCNQRLEKIYGTNNAWILRVPFREFNPKVTQNWISRFEIWPYLETFAIDAERELRAEFGGVPDLIIGNYSDGNLVAFLLARRLKVTQCNIAHALEKSKYLFSNLYWQDLEDKYHFSLQFTADLIAMNAADFIISSTYQEIVGTPDSIGQYESYQSFTMPDLYRVVNGIELFSPKFNVVPPGANEQVYFPYTHKTRRLEGDRQRLEELLFTLEDPQQIYGYLENPEKRPLFSMARLDRIKNLTGLAEAFGKSKKLQERCNLILVAGKLRTADSSDREEIAEIEKLHQIIKQYNLHGKIRWLGIRLPKADSGEIYRIIADRQGIFVQPALFEAFGLTILEAMISGLPTFGTRFGGPLEIIQHGVNGFYINPTHLEEMAEKIVRFLEQCDRDPQHWQRISKAGIERVYSKYTWKIHTERLLSLAKIYGFWNFVSQENREDMMRYLEALFHLLYKPRAQALLAEHLQR

SEQ ID NO: 336 - protein, 808 aa, synthetic construct
MTCVLLKAVLESDERNDLHQFLRILQASGKRYLLRNDILDAFADYCRDQEKPEPPPHSSRLSKLVHYTQEIIVDNESLCWIVRPRIAQQEVCRLHVEDLTIEPMTIPELLDLRDRLVNHYHPNEGDVFEIDMQPFYDYFPKIRDPKNIGRGVEFLNRYLSSKLFQDPRQWQENLFDFLRVHRYNGQQLLINERIRSPQHLSEQVKQALKVLSDRPPDEPYSEFRFELQELGFEPGWGNTVARVRETLELLAQLLDSPDHQVLEAFLSRIPMIFRIVLVSPHGWFGQEGVLGRPDTGGQVVYILDQVRALEKQMREDLELAGLGVLEAQPKIIVLTRLIPNAEGTRCNQRLEKIYGTENAWILRVPFREFNPKVTQNWISRFEIWPYLETFAIDAERELRAELGGVPDLIIGNYSDGNLVAFLLARRLKVTQCNIAHALEKSKYLFSNLYWQDLEDKYHFSLQFTADLIAMNAADFIISSTYQEIVGTPDSIGQYESYQSFTMPDLYRVVNGIELFSPKFNVVPPGANEQVYFPYTHKTRRLEGDRQRLEELLFTLEDPQQIYGYLENPEKRPLFSMARLDRIKNLTGLAEAFGKSQKLQERCNLILVAGKLRTADSSDREEIAEIEKLHQIIDQYNLHGKIRWLGIRLPKADSGEIYRIIADRQGIFVQPALFEAFGLTILEAMISGLPTFGTRFGGPLEIIQDGVNGFHINPTHLEEMAEKIVRFLEQCDRDPQHWQRISQAAIERVREKYTWKIHTERLLTLAKIYGFWNFVSQENREDMMRYLEALFHLLYKPRAQALLAEHLQR

SEQ ID NO: 337 - protein, 808 aa, synthetic construct
MTCVLLKAVVESDERADLRQFIRILQLQEKRYLLRNDILDAFADYCRDQERPVPPPSESRLSKLVRYTQEIIVDNESLCWIVRPRIAQQEVCRLHVEDLTIEPMTIPELLDLRDRLVNHYHPNEGDVFEIDVQPFYDYSPIIRDPKNIGKGVEFLNRYLSSKLFQDPRQWQQNLFNFLRIHRYNGYQLLINERIRSPQHLSEQVKQALVVLSDRPPTEAYSEFRFELQNLGFEPGWGNTVARVRDTLEILDQLLDSPDHQVLEAFLSRIPMLFRIALISPHGWFGQEGVLGRPDTGGQVVYILDQVKSLEKQMREDLELAGLGVLEAQPKIIVLTRLIPNAEGTLCNQRLEKIYGTNDAWILRVPFREFNPKVTQNWISRFEIWPYLETFAIDAERELRAEFGHVPDLIIGNYSDGNLVAFLLARRLKVTQCNIAHALEKSKYLFSNLYWQDLEDKYHFSLQFTADLIAMNAANFIISSTYQEIVGTPDSIGQYESYQSFTMPDLYHVVNGIELFSPKFNVVPPGVNEQVYFPYYHYTERLEGDRQRLEELLFTLEDPQQIYGYLENPEKRPLFSMARLDRIKNLTGLAEAFGRSKALQERCNLILVAGKLRTADSSDREEIAEIEKLYQIIHQYNLHGKIRWLGIRLPKADSGEIYRIIADRQGIFVQPALFEAFGLTILEAMISGLPTFGTRFGGPLEIIQDGVNGFYINPTHLEEMAEKIVRFLEACDRDPQEWQRISKAGIERVYSTYTWKIHCTRLLSLAKIYGFWNFVSQENREDMMRYMEALFHLLYKPRAQALLAEHLQR

SEQ ID NO: 338 - protein, 808 aa, synthetic construct
MTCVLLKAVVESDERADLRQFIRILQLQEKRYLLRNDILDAFADYCRDQERPVPPPSESRLSKLVRYTQEIIVDNESLCWIVRPRIAQQEVCRLHVEDLTFEPMTIPELLDLRDRLVNHYHPNEGDVFEIDVQPFYDYSPIIRDPKNIGKGVEFLNRYLSSKLFQDPRQWQQNLFNFLRIHRYNGQQLLINERIRSPQHLSEQVKQALKVLSDRPPDEAYSEFRFELQNLGFEPGWGNTVARVRDTLEILDQLLDSPDHQVLEAFLSRIPMLFRIALISPHGWFGQEGVLGRPDTGGQVVYILDQVKSLEKQMREDLELAGLGVLEAQPKIIVLTRLIPNAEGTLCNQRLEKIYGTNDAWILRVPFREFNPKVTQNWISRFEIWPYLETFAIDAERELRAEFGHVPDLIIGNYSDGNLVAFLLARRLKVTQCNIAHALEKSKYLFSNLYWQDLEDKYHFSLQFTADLIAMNAANFIISSTYQEIVGTPDSIGQYESYQSFTMPDLYHVVNGIELFHPKFNVVPPGVNEQVYFPYYHYTERLEGDRQRLEELLFTLEDPQQIYGNLEDPEKRPLFSMARLDRIKNLTGLAEAFGRSKALQERCNLILVAGKLRTADSSDREEIAEIEKLYQIIHQYNLHGKIRWLGIRLPKADSGEIYRIIADRQGIFVQPALFEAFGLTILEAMISGLPTFGTRFGGPLEIIQDGVNGFYINPTHLEEMAEKIVRFLEACDRDPQEWQRISKAGIERVYSTYTWKIHCTRLLSLAKIYGFWNFVSQENREDMMRYMEALFHLLYKPRAQALLAEHLQR

SEQ ID NO: 339 - protein, 808 aa, synthetic construct
MTCVLLKAVVESDERADLRQFIRILQLQEKRYLLRNDILDAFADYCRDQERPVPPPHESRLSKLVRYTQEIIVDNESLCWIVRPRIAQQEVCRLHVEDLTFEPMTIPELLDLRDRLVNHYHPNEGDVFEIDVQPFYDYSPIIRDPKNIGKGVEFLNRYLSSKLFQDPRQWQQNLFNFLRIHRYNGQQLLINERIRSPQHLSEQVKQALKYLSDRPPDEAYSEFRFELQNLGFEPGWGNTVARVRDTLEILLQLLDSPDHQVLEAFLSRIPMIFRIALISPHGWFGQEGVLGRPDTGGQVVYILDQVKSLEKQMREDLELAGLGVLEAQPKIIVLTRLIPNAEGTLCNQRLEKIYGTNDAWILRVPFREFNPKVTQNWISRFEIWPYLETFAIDAERELRAEFGHVPDLIIGNYSDGNLVAFLLARRLKVTQCNIAHALEKSKYLFSNLYWQDLEDKYHFSLQFTADLIAMNAANFIISSTYQEIVGTPDSIGQYESYQSFTMPDLYHVVNGIELFHPKFNVVPPGVNEQVYFPYYHYTERLEGDRQRLEELLFTLEDPQQIYGNLENPEKRPLFSMARLDRIKNLTGLAEAFGRSKALQERCNLILVAGKLRTADSSDREEIAEIEKLYQIIHQYNLHGKIRWLGIRLPKADSGEIYRIIADRQGIFVQPALFEAFGLTILEAMISGLPTFGTRFGGPLEIIQDGVNGFYINPTHLEEMAEKIVRFLERCDRDPQEWQRISKAGIERVYSTYTWKIHCTRLLSLAKIYGFWNFVSQENREDMMRYMEALFHLLYKPRAQALLAEHLQR

SEQ ID NO: 340 - protein, 808 aa, synthetic construct
MTCVLLKAVVESDERNDLRQFIRYLQAQEKRYLLRNDILDAFADYCRDQERPVPPPHESRLWKLVRYTQEIIVDNESLCWIVRPRIAQQEVCRLHVEDLTFEPMTIPELLDLRDRLVNHYHPNEGDVFEIDVQPFYDYSPIIRDPKNIGKGVEFLNRYLSSKLFQDPRQWQENLFNFLRIHRYNGQQLLINERIRSPQQLSEQVKQALKYLSDRPPDEAYSEFRFELQNLGFEPGWGNTVARVRDTLEILLQLLDSPDHQVLEAFVSRIPMIFRIALISPHGWFGQEGVLGRPDTGGQVVYILDQVKSLEKQMREDLELAGLGVLEAQPKIIVLTRLIPNAEGTTCNQRLEKIYGTEDAWILRVPFREFNPKVTQNWISRFEIWPYLETFAIDAERELRAEFGHVPDLIIGNYSDGNLVAFLLARRLKVTQCNIAHALEKSKYLFSNLYWQDLEDKYHFSLQFTADLIAMNAADFIISSTYQEIVGTPDSIGQYESYQSFTMPDLYHVVNGIELFHPKFNVVPPGVNEQVYFPYYHKTKRLEGDRQRLEELLFTLEDPQEIYGNLENPEKRPLFSMARLDRIKNLTGLAEAFGRSKALQERCNLILVAGKLRTADSSDREEIAEIEKLYQIIHQYNLHGKIRWLGIRLPKADSGEIYRIIADRQGIFVQPALFEAFGLTILEAMISGLPTFGTRFGGPLEIIQDGVNGFYINPTHLEEMAEKIVRFLERCDRDPQEWQRISQAGIERVYSTYTWKIHTERLLSLAKIYGFWNFMSQENREDMMRYMEALFHLLYKPRAQALLAEHLQR

SEQ ID NO: 341 - protein, 808 aa, synthetic construct
MTCVLLKAVWESDERNALRQFIRILQAQGKRYLLRNDILDAFADYCHDQERPVPPYHNSRLWKLVRYTQEIIIDNESLCWIVRPRIAQQEVCRLHVEDLTVEPMTIPELLDLRDRLVNRYHPNEGDVFEIDVQPFYDYSPKIRDPKNIGKGVEFLNRYLSSKLFQDPRQGQENLFNFLRIHRYNGQQLLINERIRNPQQLSEQVKQALKYLSDRPPDEAYSEFRFELQELGFEPGWGNTVARVRETLEILLQLLDSPDHQVLEAFLSRIPMIFRIAIISPHGWFGQEGVLGRPDTGGQVVYILDQVKSLEKQMREDLELAGLGVLEAQPKIIVLTRLIPNAEGTRCNQRLEKIYGTEDAWILRVPFREFNPKVTQNWISRFEIWPYLETFAIDAERELRAEFGHVPDLIIGNYSDGNLVAFLLARRLKVTQCNIAHALEKSKYLFSDLYWQDLEDKYHFSLQFTADLIAMNAADFIISSTYQEIVGTPDSIGQYESYQSFTMPDLYHVVNGIELFHPKFNVVPPGVNEQVYFPYYHKTKRLEGDRQRLEELLFTLEDPQEIYGNLENPEKRPLFSMARLDRIKNLTGLAEAFGRSKALQERCNLILVAGKLRTADSSDREEIAEIEKLYQIIEQYNLHGKIRWLGIRLPKADSGEIYRIIADRQGIFVQPALFEAFGLTILEAMISGLPTFGTQFGGPLEIIQHGVNGFYINPTHLEEMAEKIVRFLERCDRDPQEWQRISQAAIERVYEKYTWKIHAERLLSLAKIYGFWNFVSQENREDMMRYLEALYHLLYKPRAQALLAEHLQR

SEQ ID NO: 342 - protein, 808 aa, synthetic construct
MTCVLLKAVVESDERADLRQFSRILQLGEKRYLLRNDILDAFADYCRDQERPVPPPSESRLSKLVFYTQEIIVDNESLCWIVRPRIAQQEVCRLHVEDLTIEPMTIPELLDLRDRLVNHYHPNEGDVFEIDVQPFYDYSPIIRDAKNIGKGVEFLNRYLSSKLFQDPRQWQQNLFNFLRIHRYNGQQLLINERIRSPQHLSEQVKQALVVLSDRPPTEAYSEFRFELQNLGFEPGWGNTVARVRDTLEILDQLLDSPDHQVLEAFVSRIPMIFRIALISPHGWFGQEGVLGRPDTGGQVVYILDQVKSLEKQMREDLELAGLGVLEAQPKIIVLTRLIPNAEGTLCNQRLEKIYGTNDAWILRVPFREFNPKVTQNWISRFEIWPYLETFAIDAERELRAEFGHVPDLIIGNYSDGNLVAFLLARRLKVTQCNIAHALEKSKYLFSNLYWQDLEDKYHFSLQFTADLIAMNAANFIISSTYQEIVGTPDSIGQYESYQSFTMPDLYHVVNGIELFSPKFNVVPPGVNEQVYFPYYHYTERLEGDRQRLEELLFTLEDPQQIYGYLENPEKRPLFSMARLDRIKNLTGLAEAFGRSKALQERCNLILVAGKLRTADSSDREEKAEIEKLYQIIHQYNLHGKIRWLGIRLPKADSGEIYRIIADRQGIFVQPALFEAFGLTILEAMISGLPTFGTRFGGPLEIIQDGVNGFYINPTHLEEMAETIVRFLEHCDRDPQEWQRISKAGIERVYSTYTWKIHCTRLLSLAKIYGFWNFSSQENREDMMRYMEALFHLLYKPRAQALLAEHLQR

SEQ ID NO: 343 - protein, 808 aa, synthetic construct
MTCVLLKAVVESDERADLRQFSRILQLGEKRYLLRNDILDAFADYCRDQERPVPPPSESRLSKLVFYTQEIIVDNESLCWIVRPRIAQQEVCRLHVEDLTIEPMTIPELLDLRDRLVNHYHPNEGDVFEIDVQPFYDYSPIIRDPKNIGKGVEFLNRYLSSKLFQDPRQWQQNLFNFLRIHRYNGQQLLINERIRSPQHLSEQVKQALKVLSDRPPTEAYSEFRFELQNLGFEPGWGNTVARVRDTLEILDQLLDSPDHQVLEAFVSRIPMIFRIALISPHGWFGQEGVLGRPDTGGQVVYILDQVKSLEKQMREDLELAGLGVLEAQPKIIVLTRLIPNAEGTLCNQRLEKIYGTNDAWILRVPFREFNPKVTQNWISRFEIWPYLETFAIDAERELRAEFGHVPDLIIGNYSDGNLVAFLLARRLKVTQCNIAHALEKSKYLFSNLYWQDLEDKYHFSLQFTADLIAMNAANFIISSTYQEIVGTPDSIGQYESYQSFTMPDLYHVVNGIELFSPKFNVVPPGVNEQVYFPYTHYTERLEGDRQRLEELLFTLEDPQQIYGYLENPEKRPLFSMARLDRIKNLTGLAEAFGRSKALQERCNLILVAGKLRTADSSDREEKAEIEKLYQIIHQYNLHGKIRWLGIRLPKADSGEIYRIIADRQGIFVQPALFEAFGLTILEAMISGLPTFGTRFGGPLEIIQDGVNGFYINPTHLEEMAETIVRFLEQCDRDPQEWQRISKAGIERVYSTYTWKIHCTRLLSLAKIYGFWNFSSQENREDMMRYMEALFHLLYKPRAQALLAEHLQR

SEQ ID NO: 344 - protein, 808 aa, synthetic construct
MTCVLLKAVVESDERADLRQFSRILQLGEKRYLLRNDILDAFADYCRDQERPVPPPHESRLWKLVHYTQEIIVDNEWLCWIVRPRIAQQEVCRLHVEDLTIEPMTIPELLDLRDRLVNHYHPNEGDVFEIDVQPFYDYSPIIRDPKNIGKGVEFLNRYLSSKLFQDPRQWQQNLFNFLRIHRYNGQQLLINERIRSPQHLSEQVKQALKVLSDRPPDEAYSEFRFELQNLGFEPGWGNTVARVRDTLEILDQLLDSPDHQVLEAFVSRIPMIFRIALISPHGWFGQEGVLGRPDTGGQVVYILDQVKSLEKQMREDLELAGLGVLEAQPKIIVLTRLIPNAEGTRCNQRLEKIYGTNDAWILRVPFREFNPKVTQNWISRFEIWPYLETFAIDAERELRAEFGHVPDLIIGNYSDGNLVAFLLARRLKVTQCNIAHALEKSKYLFSNLYWQDLEDKYHFSLQFTADLIAMNAANFIISSTYQEIVGTPDSIGQYESYQSFTMPDLYHVVNGIELFSPKFNVVPPGVNEQVYFPYTETTRRLEGDRQRLEELLFTLEDPQQIYGYLENPEKRPLFSMARLDRIKNLTGLAEAFGRSKALQERCNLILVAGKLRTADSSDREEKAEIEKLYQIIDQYNLHGKIRWLGIRLPKADSGEIYRIIADRQGIFVQPALFEAFGLTILEAMISGLPTFATRFGGPLEIIQDGVNGFYINPTHLEEMAETIVRFLEHCDRDPQEWQRISKAGIERVYSTYTWKIHTTRLLSLAKIYGFWNFSSQENREDMMRYMEALFHLLYKPRAQALLAEHLQR

SEQ ID NO: 345 - protein, 808 aa, synthetic construct
MTCVLLKAVVESDERADLRQFSRILQASEKRYLLRNDILDAFADYCRDQERPVPPPHESRLWKLVRYTQEIIVDNEWLCWIVRPRIAQQEVCRLHVEDLTIEPMTIPELLDLRDRLVNHYHPNEGDVFEIDMQPFYDYFPIIRDPKNIGKGVEFLNRYLSSKLFQDPRQWQQNLFNFLRIHRYNGQQLLINERIRSPQHLSEQVKQALKVLSDRPPDEAYSEFRFELQNLGFEPGWGNTVARVRDTLEILDQLLDSPDHQVLEAFVSRIPMIFRIALISPHGWFGQEGVLGRPDTGGQVVYILDQVKSLEKQMREDLELAGLGVLEAQPKIIVLTRLIPNAEGTRCNQRLEKIYGTNDAWILRVPFREFNPKVTQNWISRFEIWPYLETFAIDAERELRAEFGHVPDLIIGNYSDGNLVAFLLARRLKVTQCNIAHALEKSKYLFSNLYWQDLEDKYHFSLQFTADLIAMNAADFIISSTYQEIVGTPDSIGQYESYQSFTMPDLYHVVNGIELFHPKFNVVPPGVNEQVYFPYYRTERRLEGDRQRLEELLFTLEDPQQIYGYLENPEKRPLFSMARLDRIKNLTGLAEAFGRSKALQERCNLILVAGKLRTADSSDREEKAEIEKLYQIIDQYNLHGKIRWLGIRLPKADSGEIYRIIADRQGIFVQPALFEAFGLTILEAMISGLPTFATRFGGPLEIIQDGVNGFYINPTHLEEMAETIVRFLEQCDRDPQHWQRISQAGIERVYSTYTWKIHTTRLLSLAKIYGFWNFVSQENREDMMRYMEALFHLLYKPRAQALLAEHLQR

SEQ ID NO: 346 - protein, 808 aa, synthetic construct
MTCVLLKAVWESDERADLRQFSRILRDSGKRYLLRNDILDAFADYCRDQERPEPPPHESRLWKLVRYTQEIIVDNEWLCWIVRPRIAQQEVCRLHVEDLTIEPMTIPELLDLRDRLVNHYHPNEGDVFEIDMQPFYDYFPKIRDPKNIGKGVEFLNRYLSSKLFQDPRQWQQNLFNFLRIHRYNGQQLLINERIRSPQHLSEQVKQALKVLSDRPPDEAYSEFRFELQNLGFEPGWGNTVARVRDTLELLAQLLDSPDHQVLEAFLSRIPMIFRIALISPHGWFGQEGVLGRPDTGGQVVYILDQVRSLEKQMREDLELAGLGVLEAQPKIIVLTRLIPNAEGTRCNQRLEKIYGTDDAWILRVPFREFNPKVTQNWISRFEIWPYLETFAIDAERELLAEFGHVPDLIIGNYSDGNLVAFLLARRLKVTQCNIAHALEKSKYLFSNLYWQDLEDKYHFSLQFTADLIAMNAADFIISSTYQEIVGTPDSIGQYESYQSFTMPDLYHVVNGIELFHPKFNVVPPGVNEQVYFPYYETERRLEGDRQRLEELLFTLEDPQQIYGYLENPEKRPLFSMARLDRIKNLTGLAEAFGRSKALQERCNLILVAGKLRTADSSDREEKAEIEKLYQIIDQYNLHGKIRWLGIRLPKADSGEIYRIIADRQGIFVQPALFEAFGLTILEAMISGLPTFATRFGGPLEIIQHGVNGFYINPTHLEEMAEKIVRFLEQCDRDPQHWQRISQAAIERVYETYTWKIHAKRLLSLAKIYGFWNFVSQENREDMMRYMEALFHLLYKPRAQALLAEHLQR

SEQ ID NO: 347 - protein, 808 aa, synthetic construct
MTCVLLKAVVESDERADLRQFSRILQLGEKRYLLRNDILDAFADYCRDQERPVPPPSESRLSKLVFYTQEIIVDNESLCWIVRPRIAQQEVCRLLVEDLTIVPMTIPELLDLRDRLVNHYHPNEGDVFEIDVQPFYDYSPIIRDAKNIGKGVEFLNRYLSSKLFQDPRQWQQNLFNFLRIHRYNGYQLLINERIRSPQHLSEQVKQALVVLSDRPPTEAYSEFRFELQNLGFEPGWGNTVARVRDTLEILDQLLDSPDHQVLEAFVSRIPMLFRIALISPHGWFGQEGVLGRPDTGGQVVYILDQVKSLEKQMREDLELAGLGVLEAQPKIIVLTRLIPNAEGTLCNQRLEKIYGTNDAWILRVPFREFNPKVTQNWISRFEIWPYLETFAIDAERELRAEFGHVPDLIIGNYSDGNLVAFLLARRLKVTQCNIAHALEKSKYLFSNLYWQDLEDKYHFSLQFTADLIAMNAANFIISSTYQEIVGTPDSIGQYESYQSFTMPDLYHVVNGIELFSPKFNVVPPGVNEQVYFPYYHYTERLEGDRQRLEELLFTLEDPQQIYGYLEAPEKRPLFSMARLDRIKNITGLMEAFGRSKALQERCNLIVVAGKLRTADSSDREEIAEIEKMYQIIHQYNLHGKIRLLGIRLPKADSGEIYRIIADRQGIFVQPALFEAFGLTILEAMISGLPTFGTRFGGPLEIIQDGVNGFYINPTHLEEMAETIVRFLEACDRDPQEWQRISKAGIERVYSTYTWKIHCTRLLSLAKIYGFWNFSSQENREDMMRYMEALFHLLYKPRAQALLAEHLQR

SEQ ID NO: 348 - protein, 808 aa, synthetic construct
MTCVLLKAVVESDERADLRQFSRILQLGEKRYLLRNDILDAFADYCRDQERPVPPPSESRLSKLVFYTQEIIVDNESLCWIVRPRIAQQEVCRLLVEDLTIVPMTIPELLDLRDRLVNHYHPNEGDVFEIDVQPFYDYSPIIRDAKNIGKGVEFLNRYLSSKLFQDPRQWQQNLFNFLRIHRYNGYQLLINERIRSPQHLSEQVKQALVVLSDRPPTEAYSEFRFELQNLGFEPGWGNTVARVRDTLEILDQLLDSPDHQVLEAFVSRIPMLFRIALISPHGWFGQEGVLGRPDTGGQVVYILDQVKSLEKQMREDLELAGLGVLEAQPKIIVLTRLIPNAEGTLCNQRLEKIYGTNDAWILRVPFREFNPKVTQNWISRFEIWPYLETFAIDAERELRAEFGHVPDLIIGNYSDGNLVAFLLARRLKVTQCNIAHALEKSKYLFSNLYWQDLEDKYHFSLQFTADLIAMNAANFIISSTYQEIVGTPDSIGQYESYQSFTMPDLYHVVNGIELFSPKFNVVPPGVNEQVYFPYYHYTERLEGDRQRLEELLFTLEDPQQIYGYLEAPEKRPLFSMARADRIKNLTGLMEAFGRSKALQERCNLIIVAGKARTADSSDREEIAEIEKMYQIMHQYNLHGKIRFLGIRLPKADSGEIYRIIADRQGAFAQPALFEAFGLTILEAMISGLPTFGTRFGGPLEIIQDGVNGFYINPTHLEEMAETIVRFLEACDRDPQEWQRISKAGIERVYSTYTWKIHCTRLLSLAKIYGFWNFSSQENREDMMRYMEALFHLLYKPRAQALLAEHLQR

SEQ ID NO: 349 - protein, 808 aa, synthetic construct
MTCVLLKAVVESDERADLRQFSRILQLGEKRYLLRNDILDAFADYCRDQERPVPPPSESRLSKLVFYTQEIIVDNESLCWIVRPRIAQQEVCRLLVEDLTIVPMTIPELLDLRDRLVNHYHPNEGDVFEIDVQPFYDYSPIIRDAKNIGKGVEFLNRYLSSKLFQDPRQWQQNLFNFLRIHRYNGYQLLINERIRSPQHLSEQVKQALVVLSDRPPTEAYSEFRFELQNLGFEPGWGNTVARVRDTLEILDQLLDSPDHQVLEAFVSRIPMLFRIALISPHGWFGQEGVLGRPDTGGQVVYILDQVKSLEKQMREDLELAGLGVLEAQPKIIVLTRLIPNAEGTLCNQRLEKIYGTNDAWILRVPFREFNPKVTQNWISRFEIWPYLETFAIDAERELRAEFGHVPDLIIGNYSDGNLVAFLLARRLKVTQCNIAHALEKSKYLFSNLYWQDLEDKYHFSLQFTADLIAMNAANFIISSTYQEIVGTPDSIGQYESYQSFTMPDLYHVVNGIELFSPKFNVVPPGVNEQVYFPYYHYTERLEGDRQRLEELLFTLEDPQQIYGYLEAPEKRPLFSMARLDRIKNLTGLLEAYGRSKALQERCNLILVAGKLRTADSSDREEIAEIEKLYQLVHQYNLHGKVRWLGIRLPKADSGEIYRIIADRQGIFVQPALFEAFGLTILEAMISGLPTFGTRFGGPLEIIQDGVNGFYINPTHLEEMAETIVRFLEACDRDPQEWQRISKAGIERVYSTYTWKIHCTRLLSLAKIYGFWNFSSQENREDMMRYMEALFHLLYKPRAQALLAEHLQR

SEQ ID NO: 350 - protein, 808 aa, synthetic construct
MTCVLLKAVVESDERADLRQFSRILQLGEKRYLLRNDILDAFADYCRDQERPVPPPSESRLSKLVFYTQEIIVDNESLCWIVRPRIAQQEVCRLLVEDLTIVPMTIPELLDLRDRLVNHYHPNEGDVFEIDVQPFYDYSPIIRDAKNIGKGVEFLNRYLSSKLFQDPRQWQQNLFNFLRIHRYNGYQLLINERIRSPQHLSEQVKQALVVLSDRPPTEAYSEFRFELQNLGFEPGWGNTVARVRDTLEILDQLLDSPDHQVLEAFVSRIPMLFRIALISPHGWFGQEGVLGRPDTGGQVVYILDQVKSLEKQMREDLELAGLGVLEAQPKIIVLTRLIPNAEGTLCNQRLEKIYGTNDAWILRVPFREFNPKVTQNWISRFEIWPYLETFAIDAERELRAEFGHVPDLIIGNYSDGNLVAFLLARRLKVTQCNIAHALEKSKYLFSNLYWQDLEDKYHFSLQFTADLIAMNAANFIISSTYQEIVGTPDSIGQYESYQSFTMPDLYHVVNGIELFSPKFNVVPPGVNEQVYFPYYHYTERLEGDRQRLEELLFTLEDPQQIYGYLEAPEKRPLFSMARLDRIKNLTGLLEVFGRSKALQERCNLIVVAGKLRTADSSDREEIAEIEKLYQILHQYNLHGKVRWLGIRLPKADSGEIYRIIADRQGIFVQPALFEAFGLTILEAMISGLPTWGTRFGGPLEIIQDGVNGFYINPTHLEEMVETWVRWLEACDRDPQEWQRISKAGIERVYSTYTWKIHCTRLLSLAKIYGFWNFSSQENREDMMRYMEALFHLLYKPRAQALLAEHLQR

SEQ ID NO: 351 - protein, 808 aa, synthetic construct
MTCVLLKAVVESDERADLRQFSRILQLGEKRYLLRNDILDAFADYCRDQERPVPPPSESRLSKLVFYTQEIIVDNESLCWIVRPRIAQQEVCRLLVEDLTIVPMTIPELLDLRDRLVNHYHPNEGDVFEIDVQPFYDYSPIIRDAKNIGKGVEFLNRYLSSKLFQDPRQWQQNLFNFLRIHRYNGYQLLINERIRSPQHLSEQVKQALVVLSDRPPTEAYSEFRFELQNLGFEPGWGNTVARVRDTLEILDQLLDSPDHQVLEAFVSRIPMLFRIALISPHGWFGQEGVLGRPDTGGQVVYILDQVKSLEKQMREDLELAGLGVLEAQPKIIVLTRLIPNAEGTLCNQRLEKIYGTNDAWILRVPFREFNPKVTQNWISRFEIWPYLETFAIDAERELRAEFGHVPDLIIGNYSDGNLVAFLLARRLKVTQCNIAHALEKSKYLFSNLYWQDLEDKYHFSLQFTADLIAMNAANFIISSTYQEIVGTPDSIGQYESYQSFTMPDLYHVVNGIELFSPKFNVVPPGVNEQVYFPYYHYTERLEGDRQRLEELLFTLEDPQQIYGYLEAPEKRPLFSMLRLDRIKNLTGLWEVWGRSKALQERCNLIVVAGKLRTADSSDREEIAEIEKLYQILHQYNLHGKLRWLGIRLPKADSGEIYRIIADRQGIFIQPALFEAFGLTILEAMISGLPTWGTRFGGPLEIIQDGVNGFYINPTHLEEMVETWVRWLEACDRDPQEWQRISKAGIERVYSTYTWKIHCTRLLSLAKIYGFWNFSSQENREDMMRYMEALFHLLYKPRAQALLAEHLQR

SEQ ID NO: 352 - protein, 808 aa, synthetic construct
MTCVLLKAVVESDERADLRQFSRILQLGEKRYLLRNDILDAFADYCRDQERPVPPPSESRLSKLVFYTQEIIVDNESLCWIVRPRIAQQEVCRLLVEDLTIVPMTIPELLDLRDRLVNHYHPNEGDVFEIDVQPFYDYSPIIRDAKNIGKGVEFLNRYLSSKLFQDPRQWQQNLFNFLRIHRYNGYQLLINERIRSPQHLSEQVKQALVVLSDRPPTEAYSEFRFELQNLGFEPGWGNTVARVRDTLEILDQLLDSPDHQVLEAFVSRIPMLFRIALISPHGWFGQEGVLGRPDTGGQVVYILDQVKSLEKQMREDLELAGLGVLEAQPKIIVLTRLIPNAEGTLCNQRLEKIYGTNDAWILRVPFREFNPKVTQNWISRFEIWPYLETFAIDAERELRAEFGHVPDLIIGNYSDGNLVAFLLARRLKVTQCNIAHALEKSKYLFSNLYWQDLEDKYHFSLQFTADLIAMNAANFIISSTYQEIVGTPDSIGQYESYQSFTMPDLYHVVNGIELFSPKFNVVPPGVNEQVYFPYYHYTERLEGDRQRLEELLFTLEDPQQIYGYIEAPEKRMLFSMARLDRIKNLTGLAEAFGRSKALQERCNLVLVAGKLRTADSSDREEIAEIEKLYQIIHQYNLHGKIRWLGIRLPKADSGEIYRVVADRQGIFVQPALFEAFGLTILEAMISGLPTFGTRFGGPLEIIQDGVNGFYINPTHLEEMAETIVRFLEACDRDPQEWQRISKAGIERVYSTYTWKIHCTRLLSLAKIYGFWNFSSQENREDMMRYMEALFHLLYKPRAQALLAEHLQR

SEQ ID NO: 353 - protein, 808 aa, synthetic construct
MTCVLLKAVVESDERADLRQFSRILQLGEKRYLLRNDILDAFADYCRDQERPVPPPSESRLSKLVFYTQEIIVDNESLCWIVRPRIAQQEVCRLLVEDLTIVPMTIPELLDLRDRLVNHYHPNEGDVFEIDVQPFYDYSPIIRDAKNIGKGVEFLNRYLSSKLFQDPRQWQQNLFNFLRIHRYNGYQLLINERIRSPQHLSEQVKQALVVLSDRPPTEAYSEFRFELQNLGFEPGWGNTVARVRDTLEILDQLLDSPDHQVLEAFVSRIPMLFRIALISPHGWFGQEGVLGRPDTGGQVVYILDQVKSLEKQMREDLELAGLGVLEAQPKIIVLTRLIPNAEGTLCNQRLEKIYGTNDAWILRVPFREFNPKVTQNWISRFEIWPYLETFAIDAERELRAEFGHVPDLIIGNYSDGNLVAFLLARRLKVTQCNIAHALEKSKYLFSNLYWQDLEDKYHFSLQFTADLIAMNAANFIISSTYQEIVGTPDSIGQYESYQSFTMPDLYHVVNGIELFSPKFNVVPPGVNEQVYFPYYHYTERLEGDRQRIEELLFTLEDPQQIYGYIEAPEKRWLISMARLDRIKNLTGLAEAFGRSKALQERCNLLLIAGKLRTADSSDREEIAEIEKLYQIIHQYNLHGKIRWLGIRLPKADSGEWYRWVADRQGIWVQPALFEAFGLTILEVMISGLPTFGTRFGGPLEIIQDGVNGFYINPTHLEEMAETIVRFLEACDRDPQEWQRISKAGIERVYSTYTWKIHCTRLLSLAKIYGFWNFSSQENREDMMRYMEALFHLLYKPRAQALLAEHLQR

SEQ ID NO: 354 - protein, 808 aa, synthetic construct
MTCVLLKAVVESDERADLRQFSRILQLGEKRYLLRNDILDAFADYCRDQERPVPPPSESRLSKLVFYTQEIIVDNESLCWIVRPRIAQQEVCRLLVEDLTIVPMTIPELLDLRDRLVNHYHPNEGDVFEIDVQPFYDYSPIIRDAKNIGKGVEFLNRYLSSKLFQDPRQWQQNLFNFLRIHRYNGYQLLINERIRSPQHLSEQVKQALVVLSDRPPTEAYSEFRFELQNLGFEPGWGNTVARVRDTLEILDQLLDSPDHQVLEAFVSRIPMLFRIALISPHGWFGQEGVLGRPDTGGQVVYILDQVKSLEKQMREDLELAGLGVLEAQPKIIVLTRLIPNAEGTLCNQRLEKIYGTNDAWILRVPFREFNPKVTQNWISRFEIWPYLETFAIDAERELRAEFGHVPDLIIGNYSDGNLVAFLLARRLKVTQCNIAHALEKSKYLFSNLYWQDLEDKYHFSLQFTADLIAMNAANFIISSTYQEIVGTPDSIGQYESYQSFTMPDLYHVVNGIELFSPKFNVVPPGVNEQVYFPYYHYTERLEGDRQRLEEVLFTLEDPQQIYGYIEAPEKRWLISMARLDRIKNLTGLAEAFGRSKALQERCNLLLIAGKLRTADSSDREEIAEIEKLYQIIHQYNLHGKIRWLGIRLPKADSGEWYRLVADRQGIWVQPALFEAFGLTILEVMISGLPTFGTRFGGPLEIIQDGVNGFYINPTHLEEMAETIVRFLEACDRDPQEWQRISKAGIERVYSTYTWKIHCTRLLSLAKIYGFWNFSSQENREDMMRYMEALFHLLYKPRAQALLAEHLQR

SEQ ID NO: 355 - protein, 808 aa, synthetic construct
MTCVLLKAVVESDERADLRQFSRILQLGEKRYLLRNDILDAFADYCRDQERPVPPPSESRLSKLVFYTQEIIVDNESLCWIVRPRIAQQEVCRLLVEDLTIVPMTIPELLDLRDRLVNHYHPNEGDVFEIDVQPFYDYSPIIRDAKNIGKGVEFLNRYLSSKLFQDPRQWQQNLFNFLRIHRYNGYQLLINERIRSPQHLSEQVKQALVVLSDRPPTEAYSEFRFELQNLGFEPGWGNTVARVRDTLEILDQLLDSPDHQVLEAFVSRIPMLFRIALISPHGWFGQEGVLGRPDTGGQVVYILDQVKSLEKQMREDLELAGLGVLEAQPKIIVLTRLIPNAEGTLCNQRLEKIYGTNDAWILRVPFREFNPKVTQNWISRFEIWPYLETFAIDAERELRAEFGHVPDLIIGNYSDGNLVAFLLARRLKVTQCNIAHALEKSKYLFSNLYWQDLEDKYHFSLQFTADLIAMNAANFIISSTYQEIVGTPDSIGQYESYQSFTMPDLYHVVNGIELFSPKFNVVPPGVNEQVYFPYYHYTERLEGDRQRLEELWFTLEDPQQIYGYLEAPEKRLLLSMARLDRIKNLTGLAEAFGRSKALQERCNLILIAGKLRTADSSDREEIAEIEKLYQIIHQYNLHGKIRWLGIRLPKADSGEIYRLIADRQGIWVQPALFEAFGLTILEVMISGLPTFGTRFGGPLEIIQDGVNGFYINPTHLEEMAETIVRFLEACDRDPQEWQRISKAGIERVYSTYTWKIHCTRLLSLAKIYGFWNFSSQENREDMMRYMEALFHLLYKPRAQALLAEHLQR

SEQ ID NO: 356 - protein, 808 aa, synthetic construct
MTCVLLKAVVESDERADLRQFSRILQLGEKRYLLRNDILDAFADYCRDQERPVPPPSESRLSKLVFYTQEIIVDNESLCWIVRPRIAQQEVCRLLVEDLTIVPMTIPELLDLRDRLVNHYHPNEGDVFEIDVQPFYDYSPIIRDAKNIGKGVEFLNRYLSSKAFQDPRQWQQNFLNFMRIHRYNGYQLGVNERIRSPQHLMEQIKQALVVLSDRPPTEAFSEFRFELQNLGFEPGLGNTVARVRDTLELMAQAADSPDHQVLEALVSRIPMLFRIALISPHGWFGQEGVLGRPDTGGQVVYILDQVKSLEKQMREDLELAGLGVLEAQPKIIVLTRLIPNAEGTLCNQRLEKIYGTNDAWILRVPFREFNPKVTQNWISRFEIWPYLETFAIDAERELRAEFGHVPDLIIGNYSDGNLVAFLLARRLKVTQCNIAHALEKSKYLFSNLYWQDLEDKYHFSLQFTADLIAMNAANFIISSTYQEIVGTPDSIGQYESYQSFTMPDLYHVVNGIELFSPKFNVVPPGVNEQVYFPYYHYTERLEGDRQRLEELLFTLEDPQQIYGYLEAPEKRPLFSMARLDRIKNLTGLAEAFGRSKALQERCNLILVAGKLRTADSSDREEIAEIEKLYQIIHQYNLHGKIRWLGIRLPKADSGEIYRIIADRQGIFVQPALFEAFGLTILEAMISGLPTFGTRFGGPLEIIQDGVNGFYINPTHLEEMAETIVRFLEACDRDPQEWQRISKAGIERVYSTYTWKIHCTRLLSLAKIYGFWNFSSQENREDMMRYMEALFHLLYKPRAQALLAEHLQR

SEQ ID NO: 357 - protein, 808 aa, synthetic construct
MTCVLLKAVVESDERADLRQFSRILQLGEKRYLLRNDILDAFADYCRDQERPVPPPSESRLSKLVFYTQEIIVDNESLCWIVRPRIAQQEVCRLLVEDLTIVPMTIPELLDLRDRLVNHYHPNEGDVFEIDVQPFYDYSPIIRDAKNIGKGVEFLNRYLSSKLFQDPRQWQQNLFNFLRIHRYNGYQLLINERIRSPQHLAEQIKQALVVLSDRPPTEAYSEFRFELQNLGFEPGLGNTVARVRDTLEIILQVLDSPDHQVLEALVSRIPMLFRIALISPHGWFGQEGVLGRPDTGGQVVYILDQVKSLEKQMREDLELAGLGVLEAQPKIIVLTRLIPNAEGTLCNQRLEKIYGTNDAWILRVPFREFNPKVTQNWISRFEIWPYLETFAIDAERELRAEFGHVPDLIIGNYSDGNLVAFLLARRLKVTQCNIAHALEKSKYLFSNLYWQDLEDKYHFSLQFTADLIAMNAANFIISSTYQEIVGTPDSIGQYESYQSFTMPDLYHVVNGIELFSPKFNVVPPGVNEQVYFPYYHYTERLEGDRQRLEELLFTLEDPQQIYGYLEAPEKRPLFSMARLDRIKNLTGLAEAFGRSKALQERCNLILVAGKLRTADSSDREEIAEIEKLYQIIHQYNLHGKIRWLGIRLPKADSGEIYRIIADRQGIFVQPALFEAFGLTILEAMISGLPTFGTRFGGPLEIIQDGVNGFYINPTHLEEMAETIVRFLEACDRDPQEWQRISKAGIERVYSTYTWKIHCTRLLSLAKIYGFWNFSSQENREDMMRYMEALFHLLYKPRAQALLAEHLQR

SEQ ID NO: 358 - protein, 808 aa, synthetic construct
MTCVLLKAVVESDERADLRQFSRILQLGEKRYLLRNDILDAFADYCRDQERPVPPPSESRLSKLVFYTQEIIVDNESLCWIVRPRIAQQEVCRLLVEDLTIVPMTIPELLDLRDRLVNHYHPNEGDVFEIDVQPFYDYSPIIRDAKNIGKGVEFLNRYLSSKWFQDPRQWQQNWLNWWRIHRYNGYQLWINERIRSPQHLVEQIKQLLVVLSDRPPTEAWSEVRFEIQNLGWEPGLGNTVARIRDTLEIILQLIDSPDHQVLEALVSRIPMLFRIALISPHGWFGQEGVLGRPDTGGQVVYILDQVKSLEKQMREDLELAGLGVLEAQPKIIVLTRLIPNAEGTLCNQRLEKIYGTNDAWILRVPFREFNPKVTQNWISRFEIWPYLETFAIDAERELRAEFGHVPDLIIGNYSDGNLVAFLLARRLKVTQCNIAHALEKSKYLFSNLYWQDLEDKYHFSLQFTADLIAMNAANFIISSTYQEIVGTPDSIGQYESYQSFTMPDLYHVVNGIELFSPKFNVVPPGVNEQVYFPYYHYTERLEGDRQRLEELLFTLEDPQQIYGYLEAPEKRPLFSMARLDRIKNLTGLAEAFGRSKALQERCNLILVAGKLRTADSSDREEIAEIEKLYQIIHQYNLHGKIRWLGIRLPKADSGEIYRIIADRQGIFVQPALFEAFGLTILEAMISGLPTFGTRFGGPLEIIQDGVNGFYINPTHLEEMAETIVRFLEACDRDPQEWQRISKAGIERVYSTYTWKIHCTRLLSLAKIYGLWNFSSQENREDMMRYMEALFHLLYKPRAQALLAEHLQR

SEQ ID NO: 359 - protein, 808 aa, synthetic construct
MTCVLLKAVVESDERADLRQFSRILQLGEKRYLLRNDILDAFADYCRDQERPVPPPSESRLSKLVFYTQEIIVDNESLCWIVRPRIAQQEVCRLLVEDLTIVPMTIPELLDLRDRLVNHYHPNEGDVFEIDVQPFYDYSPIIRDAKNIGKGVEFLNRYISSKLFQDPRQWQQNLINWLRIHRYNGYQLLWNERIRSPQHLLEQIKQLLVVLSDRPPTEAWSEIRFELQNLGWEPGLGNTVARVRDTLEIWLQLLDSPDHQVWEAWVSRIPMLFRIALISPHGWFGQEGVLGRPDTGGQVVYILDQVKSLEKQMREDLELAGLGVLEAQPKIIVLTRLIPNAEGTLCNQRLEKIYGTNDAWILRVPFREFNPKVTQNWISRFEIWPYLETFAIDAERELRAEFGHVPDLIIGNYSDGNLVAFLLARRLKVTQCNIAHALEKSKYLFSNLYWQDLEDKYHFSLQFTADLIAMNAANFIISSTYQEIVGTPDSIGQYESYQSFTMPDLYHVVNGIELFSPKFNVVPPGVNEQVYFPYYHYTERLEGDRQRLEELLFTLEDPQQIYGYLEAPEKRPLFSMARLDRIKNLTGLAEAFGRSKALQERCNLILVAGKLRTADSSDREEIAEIEKLYQIIHQYNLHGKIRWLGIRLPKADSGEIYRIIADRQGIFVQPALFEAFGLTILEAMISGLPTFGTRFGGPLEIIQDGVNGFYINPTHLEEMAETIVRFLEACDRDPQEWQRISKAGIERVYSTYTWKIHCTRLLSLAKIYGLWNFSSQENREDMMRYMEALFHLLYKPRAQALLAEHLQR

SEQ ID NO: 360 - protein, 808 aa, synthetic construct
MTCVLLKAVVESDERADLRQFSRILQLGEKRYLLRNDILDAFADYCRDQERPVPPPSESRLSKLVFYTQEIIVDNESLCWIVRPRIAQQEVCRLLVEDLTIVPMTIPELLDLRDRLVNHYHPNEGDVFEIDVQPFYDYSPIIRDAKNIGKGVEFLNRYISSKLFQDPRQWQQNLINWLRIHRYNGYQLWWNERIRSPQHLLEQIKQVLVVLSDRPPTEAWSEIRFEWQNLGWEPGWGNTVARVRDTLEILLQLLDSPDHQVWEAWVSRVPMLFRIALISPHGWFGQEGVLGRPDTGGQVVYILDQVKSLEKQMREDLELAGLGVLEAQPKIIVLTRLIPNAEGTLCNQRLEKIYGTNDAWILRVPFREFNPKVTQNWISRFEIWPYLETFAIDAERELRAEFGHVPDLIIGNYSDGNLVAFLLARRLKVTQCNIAHALEKSKYLFSNLYWQDLEDKYHFSLQFTADLIAMNAANFIISSTYQEIVGTPDSIGQYESYQSFTMPDLYHVVNGIELFSPKFNVVPPGVNEQVYFPYYHYTERLEGDRQRLEELLFTLEDPQQIYGYLEAPEKRPLFSMARLDRIKNLTGLAEAFGRSKALQERCNLILVAGKLRTADSSDREEIAEIEKLYQIIHQYNLHGKIRWLGIRLPKADSGEIYRIIADRQGIFVQPALFEAFGLTILEAMISGLPTFGTRFGGPLEIIQDGVNGFYINPTHLEEMAETIVRFLEACDRDPQEWQRISKAGIERVYSTYTWKIHCTRLLSLAKIYGWWNFSSQENREDMMRYMEALFHLLYKPRAQALLAEHLQR

SEQ ID NO: 361 - protein, 808 aa, synthetic construct
MTCVLLKAVVESDERADLRQFSRILQLGEKRYLLRNDILDAFADYCRDQERPVPPPSESRLSKLVFYTQEIIVDNESLCWIVRPRIAQQEVCRLLVEDLTIVPMTIPELLDLRDRLVNHYHPNEGDVFEIDVQPFYDYSPIIRDAKNIGKGVEFLNRYLSSKLFQDPRQWQQNLFNFLRIHRYNGYQLLINERIRSPQHLSEQVKQALVVLSDRPPTEAYSEFRFELQNLGFEPGWGNTVARVRDTLEILDQLLDSPDHQVLEAFVSRIPMLFRIALISPHGWFGQEGVLGRPDTGGQVVYILDQVKSLEKQMREDLELAGLGVLEAQPKIIVLTRLIPNAEGTLCNQRLEKIYGTNDAWILRVPFREFNPKVTQNWISRFEIWPYLETFAIDAERELRAEFGHVPDLIIGNYSDGNLVAFLLARRLKVTQANIAHALEKSKYLFSNLYWQDLEDKYHFSLQFTADLIAMNAANFIISSTYQEIVGTPDSIGQYESYQSFTMPDLYHVVNGIELFSPKFNVGPPGVNEQVYFPYYHYTERLEGDRQRLEELLFTLEDPQQIYGYLEAPEKRPLFSMARLDRIKNLTGLAEAFGRSKALQERCNLILVAGKLRTADSSDREEIAEIEKLYQIIHQYNLHGKIRWLGIRLPKADSGEIYRIIADRQGIFVQPALFEAFGLTILEAMISGLPTFGTRFGGPLEIIQDGVNGFYINPTHLEEMAETIVRFLEACDRDPQEWQRISKAGIERVYSTYTWKIVCTRILSWAKIYGFWNFSSQENREDMMRYMEALFHLLYKPRAQALLAEHLQR

SEQ ID NO: 362 - protein, 808 aa, synthetic construct
MTCVLLKAVVESDERADLRQFSRILQLGEKRYLLRNDILDAFADYCRDQERPVPPPSESRLSKLVFYTQEIIVDNESLCWIVRPRIAQQEVCRLLVEDLTIVPMTIPELLDLRDRLVNHYHPNEGDVFEIDVQPFYDYSPIIRDAKNIGKGVEFLNRYLSSKLFQDPRQWQQNLFNFLRIHRYNGYQLLINERIRSPQHLSEQVKQALVVLSDRPPTEAYSEFRFELQNLGFEPGWGNTVARVRDTLEILDQLLDSPDHQVLEAFVSRIPMLFRIALISPHGWFGQEGVLGRPDTGGQVVLILDQVKSLEKQMREDLELAGLGVLEAQPKIIVLTRLIPNAEGTLCNQRLEKIYGTNDAWILRVPFREFNPKVTQNWISRFEIWPYLETFAIDAERELRAEFGHVPDVIIGNYSDGNLVAFLLARRLKVTQINIAHALEKSKYLFSNLYWQDLEDKYHFSLQFTADLIAMNAANAIISSTYQEIVGTPDSIGQYESYQSFTMPDLYHVVNGIELFSPKFNVVPPGVNEQVYFPYYHYTERLEGDRQRLEELLFTLEDPQQIYGYLEAPEKRPLFSMARLDRIKNLTGLAEAFGRSKALQERCNLILVAGKLRTADSSDREEIAEIEKLYQIIHQYNLHGKIRWLGIRLPKADSGEIYRIIADRQGIFVQPALFEAFGLTILEAMISGLPTFGTRFGGPLEIIQDGVNGFYINPTHLEEMAETIVRFLEACDRDPQEWQRISKAGIERVYSTYTWKIFCTRILSLAKIYGFWNFSSQENREDMMRYMEALFHLLYKPRAQALLAEHLQR

SEQ ID NO: 363 - protein, 808 aa, synthetic construct
MTCVLLKAVVESDERADLRQFSRILQLGEKRYLLRNDILDAFADYCRDQERPVPPPSESRLSKLVFYTQEIIVDNESLCWIVRPRIAQQEVCRLLVEDLTIVPMTIPELLDLRDRLVNHYHPNEGDVFEIDVQPFYDYSPIIRDAKNIGKGVEFLNRYLSSKLFQDPRQWQQNLFNFLRIHRYNGYQLLINERIRSPQHLSEQVKQALVVLSDRPPTEAYSEFRFELQNLGFEPGWGNTVARVRDTLEILDQLLDSPDHQVLEAFVSRIPMLFRIAIISPHGWFGQEGVLGRPDTGGQVVWILDQVKSLEKQIREDLELAGLGVLEAQPKIIILTRLIPNAEGTLCNQRLEKIYGTNDAWILRVPFREFNPKVTQNWISRFEIWPYLETFAIDAERELRAEFGHVPDLIIGNYSDGNLVAFLLARRLKVTQVNIAHALEKSKYLFSNLYWQDLEDKYHFSLQFTADLIAMNAANFIISSTYQEIVGTPDSIGQYESYQSFTMPDLYHVVNGIELFSPKFNVIPPGVNEQVYFPYYHYTERLEGDRQRLEELLFTLEDPQQIYGYLEAPEKRPLFSMARLDRIKNLTGLAEAFGRSKALQERCNLILVAGKLRTADSSDREEIAEIEKLYQIIHQYNLHGKIRWLGIRLPKADSGEIYRIIADRQGIFVQPALFEAFGLTILEAMISGLPTFGTRFGGPLEIIQDGVNGFYINPTHLEEMAETIVRFLEACDRDPQEWQRISKAGIERVYSTYTWKIWCTRWLSLVKIYGFWNFSSQENREDMMRYMEALFHLLYKPRAQALLAEHLQR

SEQ ID NO: 364 - protein, 808 aa, synthetic construct
MTCVLLKAVVESDERADLRQFSRILQLGEKRYLLRNDILDAFADYCRDQERPVPPPSESRLSKLVFYTQEIIVDNESLCWIVRPRIAQQEVCRLLVEDLTIVPMTIPELLDLRDRLVNHYHPNEGDVFEIDVQPFYDYSPIIRDAKNIGKGVEFLNRYLSSKLFQDPRQWQQNLFNFLRIHRYNGYQLLINERIRSPQHLSEQVKQALVVLSDRPPTEAYSEFRFELQNLGFEPGWGNTVARVRDTLEILDQLLDSPDHQVLEAFVSRIPMLFRIAIISPHGWFGQEGVLGRPDTGGQVVWILDQVKSLEKQMREDLELAGLGVLEAQPKIIILTRLIPNAEGTLCNQRLEKIYGTNDAWILRVPFREFNPKVTQNWISRFEIWPYLETFAIDAERELRAEFGHVPDLIIGNYSDGNLVAFLLARRLKVTQLNMAHALEKSKYLFSNLYWQDLEDKYHFSLQFTADLIAMNAANFIISSTYQEIVGTPDSIGQYESYQSFTMPDLYHVVNGIELFSPKFNVIPPGVNEQVYFPYYHYTERLEGDRQRLEELLFTLEDPQQIYGYLEAPEKRPLFSMARLDRIKNLTGLAEAFGRSKALQERCNLILVAGKLRTADSSDREEIAEIEKLYQIIHQYNLHGKIRWLGIRLPKADSGEIYRIIADRQGIFVQPALFEAFGLTILEAMISGLPTFGTRFGGPLEIIQDGVNGFYINPTHLEEMAETIVRFLEACDRDPQEWQRISKAGIERVYSTYTWKIFCTRLLSLVKIYGFWNFSSQENREDMMRYMEALFHLLYKPRAQALLAEHLQR

SEQ ID NO: 365 - protein, 808 aa, synthetic construct
MTCVLLKAVVESDERADLRQFSRILQLGEKRYLLRNDILDAFADYCRDQERPVPPPSESRLSKLVFYTQEIIVDNESLCWIVRPRIAQQEVCRLLVEDLTIVPMTIPELLDLRDRLVNHYHPNEGDVFEIDVQPFYDYSPIIRDAKNIGKGVEFLNRYLSSKLFQDPRQWQQNLFNFLRIHRYNGYQLLINERIRSPQHLSEQVKQALVVLSDRPPTEAYSEFRFELQNLGFEPGWGNTVARVRDTLEILDQLLDSPDHQVLEAFVSRIPMLFRIAIISPHGWFGQEGVLGRPDTGGQVVIILDQVKSLEKQIREDLELAGLGVLEAQPKIIILTRLIPNAEGTLCNQRLEKIYGTNDAWILRVPFREFNPKVTQNWISRFEIWPYLETFAIDAERELRAEFGHVPDLIIGNYSDGNLVAFLLARRLKVTQLNMAHALEKSKYLFSNLYWQDLEDKYHFSLQFTADLIAMNAANFIISSTYQEIVGTPDSIGQYESYQSFTMPDLYHVVNGIELFSPKFNVIPPGVNEQVYFPYYHYTERLEGDRQRLEELLFTLEDPQQIYGYLEAPEKRPLFSMARLDRIKNLTGLAEAFGRSKALQERCNLILVAGKLRTADSSDREEIAEIEKLYQIIHQYNLHGKIRWLGIRLPKADSGEIYRIIADRQGIFVQPALFEAFGLTILEAMISGLPTFGTRFGGPLEIIQDGVNGFYINPTHLEEMAETIVRFLEACDRDPQEWQRISKAGIERVYSTYTWKIWCTRILSLIKIYGFWNFSSQENREDMMRYMEALFHLLYKPRAQALLAEHLQR

SEQ ID NO: 366 - protein, 808 aa, synthetic construct
MTCVLLKAVVESDERADLRQFSRILQLGEKRYLLRNDILDAFADYCRDQERPVPPPSESRLSKLVFYTQEIIVDNESLCWIVRPRIAQQEVCRLLVEDLTIVPMTIPELLDLRDRLVNHYHPNEGDVFEIDVQPFYDYSPIIRDAKNIGKGVEFLNRYLSSKLFQDPRQWQQNLFNFLRIHRYNGYQLLINERIRSPQHLSEQVKQALVVLSDRPPTEAYSEFRFELQNLGFEPGWGNTVARVRDTLEILDQLLDSPDHQVLEAFVSRIPMLFRILLISAHGWFGQEGVLGRPDTGGQVVYILDQVKSLEKQMREDLELAGLGVLEAQPKIVVATRLIPNAEGTLCNQRLEKIYGTNDAWILRVPFREFNPKVTQNWISRFEIWPYLETFAIDLEREARAEFGHVPDLIIGNYSDGNLVAFLLARRLKVTQCNIAHALEKSKYLFSNLYWQDLEDKYHFSLQFTADLIAMNAANFIISSTYQEIVGTPDSIGQYESYQSFTMPDLYHVVNGIELFSPKFNVVPPGVNEQVYFPYYHYTERLEGDRQRLEELLFTLEDPQQIYGYLEAPEKRPLFSMARLDRIKNLTGLAEAFGRSKALQERCNLILVAGKLRTADSSDREEIAEIEKLYQIIHQYNLHGKIRWLGIRLPKADSGEIYRIIADRQGIFVQPALFEAFGLTILEAMISGLPTFGTRFGGPLEIIQDGVNGFYINPTHLEEMAETIVRFLEACDRDPQEWQRISKAGIERVYSTYTWKIHCTRLLSLAKIYGFWNFSSQENREDMMRYMEALFHLLYKPRAQALLAEHLQR

SEQ ID NO: 367 - protein, 808 aa, synthetic construct
MTCVLLKAVVESDERADLRQFSRILQLGEKRYLLRNDILDAFADYCRDQERPVPPPSESRLSKLVFYTQEIIVDNESLCWIVRPRIAQQEVCRLLVEDLTIVPMTIPELLDLRDRLVNHYHPNEGDVFEIDVQPFYDYSPIIRDAKNIGKGVEFLNRYLSSKLFQDPRQWQQNLFNFLRIHRYNGYQLLINERIRSPQHLSEQVKQALVVLSDRPPTEAYSEFRFELQNLGFEPGWGNTVARVRDTLEILDQLLDSPDHQVLEAFVSRIPMLFRILLISAHGWFGQEGVLGRPDTGGQVVYILDQVKSLEKQMREDLELAGLGVLEAQPKIIVLTRLIPNAEGTLCNQRLEKIYGTNDAWILRVPFREFNPKVTQNWISRFEIWPYLETFAIDAEREVRAEMGHVPDLIIGNYSDGNLVAFLLARRLKVTQCNIAHALEKSKYLFSNLYWQDLEDKYHFSLQFTADLIAMNAANFIISSTYQEIVGTPDSIGQYESYQSFTMPDLYHVVNGIELFSPKFNVVPPGVNEQVYFPYYHYTERLEGDRQRLEELLFTLEDPQQIYGYLEAPEKRPLFSMARLDRIKNLTGLAEAFGRSKALQERCNLILVAGKLRTADSSDREEIAEIEKLYQIIHQYNLHGKIRWLGIRLPKADSGEIYRIIADRQGIFVQPALFEAFGLTILEAMISGLPTFGTRFGGPLEIIQDGVNGFYINPTHLEEMAETIVRFLEACDRDPQEWQRISKAGIERVYSTYTWKIHCTRLLSLAKIYGFWNFSSQENREDMMRYMEALFHLLYKPRAQALLAEHLQR

SEQ ID NO: 368 - protein, 808 aa, synthetic construct
MTCVLLKAVVESDERADLRQFSRILQLGEKRYLLRNDILDAFADYCRDQERPVPPPSESRLSKLVFYTQEIIVDNESLCWIVRPRIAQQEVCRLLVEDLTIVPMTIPELLDLRDRLVNHYHPNEGDVFEIDVQPFYDYSPIIRDAKNIGKGVEFLNRYLSSKLFQDPRQWQQNLFNFLRIHRYNGYQLLINERIRSPQHLSEQVKQALVVLSDRPPTEAYSEFRFELQNLGFEPGWGNTVARVRDTLEILDQLLDSPDHQVLEAFVSRIPMLFRIALISMHGWFGQEGVLGRPDTGGQVVYILDQVKSLEKQMREDLELAGLGVLEAQPKIIVITRLIPNAEGTLCNQRLEKIYGTNDAWILRVPFREFNPKVTQNWISRFEIWPYLETAAIDIEREVRAELGHVPDLIIGNYSDGNLVAFLLARRLKVTQCNIAHALEKSKYLFSNLYWQDLEDKYHFSLQFTADLIAMNAANFIISSTYQEIVGTPDSIGQYESYQSFTMPDLYHVVNGIELFSPKFNVVPPGVNEQVYFPYYHYTERLEGDRQRLEELLFTLEDPQQIYGYLEAPEKRPLFSMARLDRIKNLTGLAEAFGRSKALQERCNLILVAGKLRTADSSDREEIAEIEKLYQIIHQYNLHGKIRWLGIRLPKADSGEIYRIIADRQGIFVQPALFEAFGLTILEAMISGLPTFGTRFGGPLEIIQDGVNGFYINPTHLEEMAETIVRFLEACDRDPQEWQRISKAGIERVYSTYTWKIHCTRLLSLAKIYGFWNFSSQENREDMMRYMEALFHLLYKPRAQALLAEHLQR

SEQ ID NO: 369 - protein, 808 aa, synthetic construct
MTCVLLKAVVESDERADLRQFSRILQLGEKRYLLRNDILDAFADYCRDQERPVPPPSESRLSKLVFYTQEIIVDNESLCWIVRPRIAQQEVCRLLVEDLTIVPMTIPELLDLRDRLVNHYHPNEGDVFEIDVQPFYDYSPIIRDAKNIGKGVEFLNRYLSSKLFQDPRQWQQNLFNFLRIHRYNGYQLLINERIRSPQHLSEQVKQALVVLSDRPPTEAYSEFRFELQNLGFEPGWGNTVARVRDTLEILDQLLDSPDHQVLEAFVSRIPMLFRIVLISIHGWFGQEGVLGRPDTGGQVVYILDQVKSLEKQMREDLELAGLGVLEAQPKIIVLTRLIPNAEGTLCNQRLEKIYGTNDAWILRIPFREFNPKVTQNWISRFEIWPYLETWVIDVEREVRAELGHVPDLIIGNYSDGNLVAFLLARRWKITQCNIAHALEKSKYLFSNLYWQDLEDKYHFSLQFTADLIAMNAANFIISSTYQEIVGTPDSIGQYESYQSFTMPDLYHVVNGIELFSPKFNVVPPGVNEQVYFPYYHYTERLEGDRQRLEELLFTLEDPQQIYGYLEAPEKRPLFSMARLDRIKNLTGLAEAFGRSKALQERCNLILVAGKLRTADSSDREEIAEIEKLYQIIHQYNLHGKIRWLGIRLPKADSGEIYRIIADRQGIFVQPALFEAFGLTILEAMISGLPTFGTRFGGPLEIIQDGVNGFYINPTHLEEMAETIVRFLEACDRDPQEWQRISKAGIERVYSTYTWKIHCTRLLSLAKIYGFWNFSSQENREDMMRYMEALFHLLYKPRAQALLAEHLQR

SEQ ID NO: 370 - protein, 808 aa, synthetic construct
MTCVLLKAVVESDERADLRQFSRILQLGEKRYLLRNDILDAFADYCRDQERPVPPPSESRLSKLVFYTQEIIVDNESLCWIVRPRIAQQEVCRLLVEDLTIVPMTIPELLDLRDRLVNHYHPNEGDVFEIDVQPFYDYSPIIRDAKNIGKGVEFLNRYLSSKLFQDPRQWQQNLFNFLRIHRYNGYQLLINERIRSPQHLSEQVKQALVVLSDRPPTEAYSEFRFELQNLGFEPGWGNTVARVRDTLEILDQLLDSPDHQVLEAFVSRIPMLFRILLISVHGWFGQEGVLGRPDTGGQVVYILDQVKSLEKQMREDLELAGLGVLEAQPKIIVLTRLIPNAEGTLCNQRLEKIYGTNDAWILRIPFREFNPKVTQNWISRFEIWPYLETWVIDVERELRAEFGHVPDLIIGNYSDGNLIAFLLARRLKITQCNIAHALEKSKYLFSNLYWQDLEDKYHFSLQFTADLIAMNAANFIISSTYQEIVGTPDSIGQYESYQSFTMPDLYHVVNGIELFSPKFNVVPPGVNEQVYFPYYHYTERLEGDRQRLEELLFTLEDPQQIYGYLEAPEKRPLFSMARLDRIKNLTGLAEAFGRSKALQERCNLILVAGKLRTADSSDREEIAEIEKLYQIIHQYNLHGKIRWLGIRLPKADSGEIYRIIADRQGIFVQPALFEAFGLTILEAMISGLPTFGTRFGGPLEIIQDGVNGFYINPTHLEEMAETIVRFLEACDRDPQEWQRISKAGIERVYSTYTWKIHCTRLLSLAKIYGFWNFSSQENREDMMRYMEALFHLLYKPRAQALLAEHLQR

SEQ ID NO: 371 - protein, 808 aa, synthetic construct
MTCVLLKAVVESDERADLRQFSRILQLGEKRYLLRNDILDAFADYCRDQERPVPPPSESRLSKLVFYTQEIIVDNESLCWIVRPRIAQQEVCRLLVEDLTIVPMTIPELLDLRDRLVNHYHPNEGDVFEIDMQPFYDYSPIIRDAKNIGKGVEFLNRYLSSKLFQDPRQWQQNLFNFLRIHRYNGYQLLINERIRSPQHLSEQVKQALVVLSDRPPTEAYSEFRFELQNLGFEPGWGNTVARVRDTLEILDQLLDSPDHQVLEAFVSRIPMLFRIALISPHGWFGQEGVLGRPDTGGQVVYILDQVKSLEKQMREDLELAGLGVLEAQPKIIVLTRLIPNAEGTLCNQRLEKIYGTNDAWILRVPFREFNPKVTQNWISRFEIWPYLETFAIDAERELRAEFGHVPDLIIGNYSDGNLVAFLLARRLKVTQCNIAHALEKSKYLFSNLYWQDLEDKYHFSLQFTADLIAMNAANFIISSTYQEIVGTPDSIGQYESYQSFTMPDLYHVVNGIELFSPKFNVVPPGVNEQVYFPYYHYTERLEGDRQRLEELLFTLEDPQQIYGYLEAPEKRPLFSMARLDRIKNLTGLAEAFGRSKALQERCNLILVAGKLRTADSSDREEIAEIEKLYQIIHQYNLHGKIRWLGIRLPKADSGEIYRIIADRQGIFVQPALFEAFGLTILEAMISGLPTFGTRFGGPLEIIQDGVNGFYINPTHLEEMAETIVRFLEACDRDPQEWQRISKAGIERVYSTYTWKIHCTRLLSLAKIYGFWNFSSQENREDMMRYLEAMFHLLYKPRAQALLAEHLQR

SEQ ID NO: 372 - protein, 808 aa, synthetic construct
MTCVLLKAVVESDERADLRQFSRILQLGEKRYLLRNDILDAFADYCRDQERPVPPPSESRLSKLVFYTQEIIVDNESLCWIVRPRIAQQEVCRLLVEDLTIVPMTIPELLDLRDRLVNHYHPNEGDVLELDWQPFYDYSPIIRDAKNIGKGVEFLNRYLSSKLFQDPRQWQQNLFNFLRIHRYNGYQLLINERIRSPQHLSEQVKQALVVLSDRPPTEAYSEFRFELQNLGFEPGWGNTVARVRDTLEILDQLLDSPDHQVLEAFVSRIPMLFRIALISPHGWFGQEGVLGRPDTGGQVVYILDQVKSLEKQMREDLELAGLGVLEAQPKIIVLTRLIPNAEGTLCNQRLEKIYGTNDAWILRVPFREFNPKVTQNWISRFEIWPYLETFAIDAERELRAEFGHVPDLIIGNYSDGNLVAFLLARRLKVTQCNIAHALEKSKYLFSNLYWQDLEDKYHFSLQFTADLIAMNAANFIISSTYQEIVGTPDSIGQYESYQSFTMPDLYHVVNGIELFSPKFNVVPPGVNEQVYFPYYHYTERLEGDRQRLEELLFTLEDPQQIYGYLEAPEKRPLFSMARLDRIKNLTGLAEAFGRSKALQERCNLILVAGKLRTADSSDREEIAEIEKLYQIIHQYNLHGKIRWLGIRLPKADSGEIYRIIADRQGIFVQPALFEAFGLTILEAMISGLPTFGTRFGGPLEIIQDGVNGFYINPTHLEEMAETIVRFLEACDRDPQEWQRISKAGIERVYSTYTWKIHCTRLLSLAKIYGFWNFSSQENREDMMRYLEALFHLLYKPRAQALLAEHLQR

SEQ ID NO: 373 - protein, 808 aa, synthetic construct
MTCVLLKAVVESDERADLRQFSRILQLGEKRYLLRNDILDAFADYCRDQERPVPPPSESRLSKLVFYTQEIIVDNESLCWIVRPRIAQQEVCRLLVEDLTIVPMTIPELLDLRDRLVNHYHPNEGDVLELDWQPLYDYSPIIRDAKNIGKGVEFLNRYLSSKLFQDPRQWQQNLFNFLRIHRYNGYQLLINERIRSPQHLSEQVKQALVVLSDRPPTEAYSEFRFELQNLGFEPGWGNTVARVRDTLEILDQLLDSPDHQVLEAFVSRIPMLFRIALISPHGWFGQEGVLGRPDTGGQVVYILDQVKSLEKQMREDLELAGLGVLEAQPKIIVLTRLIPNAEGTLCNQRLEKIYGTNDAWILRVPFREFNPKVTQNWISRFEIWPYLETFAIDAERELRAEFGHVPDLIIGNYSDGNLVAFLLARRLKVTQCNIAHALEKSKYLFSNLYWQDLEDKYHFSLQFTADLIAMNAANFIISSTYQEIVGTPDSIGQYESYQSFTMPDLYHVVNGLELFSPKFNVVPPGVNEQVYFPYYHYTERLEGDRQRLEELLFTLEDPQQIYGYLEAPEKRPLFSMARLDRIKNLTGLAEAFGRSKALQERCNLILVAGKLRTADSSDREEIAEIEKLYQIIHQYNLHGKIRWLGIRLPKADSGEIYRIIADRQGIFVQPALFEAFGLTILEAMISGLPTFGTRFGGPLEIIQDGVNGFYINPTHLEEMAETIVRFLEACDRDPQEWQRISKAGIERVYSTYTWKIHCTRLLSLAKIYGFWNFSSQENREDMMRYIEAIFHLLYKPRAQALLAEHLQR

SEQ ID NO: 374 - protein, 808 aa, synthetic construct
MTCVLLKAVVESDERADLRQFSRILQLGEKRYLLRNDILDAFADYCRDQERPVPPPSESRLSKLVFYTQEIIVDNESLCWIVRPRIAQQEVCRLLVEDLTIVPMTIPELLDLRDRLVNHYHPNEGDVWEIDLQPWYDYSPIIRDAKNIGKGVEFLNRYLSSKLFQDPRQWQQNLFNFLRIHRYNGYQLLINERIRSPQHLSEQVKQALVVLSDRPPTEAYSEFRFELQNLGFEPGWGNTVARVRDTLEILDQLLDSPDHQVLEAFVSRIPMLFRIALISPHGWFGQEGVLGRPDTGGQVVYILDQVKSLEKQMREDLELAGLGVLEAQPKIIVLTRLIPNAEGTLCNQRLEKIYGTNDAWILRVPFREFNPKVTQNWISRFEIWPYLETFAIDAERELRAEFGHVPDLIIGNYSDGNLVAFLLARRLKVTQCNIAHALEKSKYLFSNLYWQDLEDKYHFSLQFTADWIAMNAANFIISSTYQEIVGTPDSIGQYESYQSFTMPDLYHVVNGIELFSPKFNVVPPGVNEQVYFPYYHYTERLEGDRQRLEELLFTLEDPQQIYGYLEAPEKRPLFSMARLDRIKNLTGLAEAFGRSKALQERCNLILVAGKLRTADSSDREEIAEIEKLYQIIHQYNLHGKIRWLGIRLPKADSGEIYRIIADRQGIFVQPALFEAFGLTILEAMISGLPTFGTRFGGPLEIIQDGVNGFYINPTHLEEMAETIVRFLEACDRDPQEWQRISKAGIERVYSTYTWKIHCTRLLSLAKIYGFWNFSSQENREDMMRYLEAIFHLLYKPRAQALLAEHLQR

SEQ ID NO: 375 - protein, 808 aa, synthetic construct
MTCVLLKAVVESDERADLRQFSRILQLGEKRYLLRNDILDAFADYCRDQERPVPPPSESRLSKLVFYTQEIIVDNESLCWIVRPRIAQQEVCRLLVEDLTIVPMTIPELLDLRDRLVNHYHPNEGDVWEIDWQPLYDYSPIIRDAKNIGKGVEFLNRYLSSKLFQDPRQWQQNLFNFLRIHRYNGYQLLINERIRSPQHLSEQVKQALVVLSDRPPTEAYSEFRFELQNLGFEPGWGNTVARVRDTLEILDQLLDSPDHQVLEAFVSRIPMLFRIALISPHGWFGQEGVLGRPDTGGQVVYILDQVKSLEKQMREDLELAGLGVLEAQPKIIVLTRLIPNAEGTLCNQRLEKIYGTNDAWILRVPFREFNPKVTQNWISRFEIWPYLETFAIDAERELRAEFGHVPDLIIGNYSDGNLVAFLLARRLKVTQCNIAHALEKSKYLFSNLYWQDLEDKYHFSLQFTADLIAMNAANFIISSTYQEIVGTPDSIGQYESYQSFTMPDLYHIVNGIELFSPKFNVVPPGVNEQVYFPYYHYTERLEGDRQRLEELLFTLEDPQQIYGYLEAPEKRPLFSMARLDRIKNLTGLAEAFGRSKALQERCNLILVAGKLRTADSSDREEIAEIEKLYQIIHQYNLHGKIRWLGIRLPKADSGEIYRIIADRQGIFVQPALFEAFGLTILEAMISGLPTFGTRFGGPLEIIQDGVNGFYINPTHLEEMAETIVRFLEACDRDPQEWQRISKAGIERVYSTYTWKIHCTRLLSLAKIYGFWNFSSQENREDMMRYLEAIFHLLYKPRAQALLAEHLQR

SEQ ID NO: 376 - protein, 808 aa, synthetic construct
MTCVLLKAVVESDERADLRQFSRILQLGEKRYLLRNDILDAFADYCRDQERPVPPPSESRLSKLVFYTQEIIVDNESLCWIVRPRIAQQEVCRLLVEDLTIVPMTIPELLDLRDRLVNHYHPNEGDVFEIDVQPFYDYSPIIRDAKNIGKGVEFLNRYLSSKLFQDPRQWQQNLFNFLRIHRYNGYQLLINERIRSPQHLSEQVKQALVVLSDRPPTEAYSEFRFELQNLGFEPGWGNTVARVRDTLEILDQLLDSPDHQVLEAFVSRIPMLFRVAIISPHGWFGQEGVLGRPDTGGQVVYILDQVKSLEKQMREDLELAGLGVLEAQPKIIILTRLIPNAEGTLCNQRLEKIYGTNDAWILRVPFREFNPKVTQNWISRFEIWPYLETFAIDAERELRAEFGHVPDVIIGNYSDGNLVAFLLARRLKVTQINIAHALEKSKYLFSNLYWQDLEDKYHFSLQFTADLIAMNAANAIVSSTYQEIVGTPDSIGQYESYQSFTMPDLYHVVNGIELFSPKFNVIPPGVNEQVYFPYYHYTERLEGDRQRLEELLFTLEDPQQIYGYLEAPEKRPLFSMARLDRIKNLTGLAEAFGRSKALQERCNLILVAGKLRTADSSDREEIAEIEKLYQIIHQYNLHGKIRWLGIRLPKADSGEIYRIIADRQGIFVQPALFEAFGLTILEAMISGLPTFGTRFGGPLEIIQDGVNGFYINPTHLEEMAETIVRFLEACDRDPQEWQRISKAGIERVYSTYTWKIYCTRMMSLAKIMGFWNFSSQENREDMMRYMEALFHLLYKPRAQALLAEHLQR

SEQ ID NO: 377 - protein, 808 aa, synthetic construct
MTCVLLKAVVESDERADLRQFSRILQLGEKRYLLRNDILDAFADYCRDQERPVPPPSESRLSKLVFYTQEIIVDNESLCWIVRPRIAQQEVCRLLVEDLTIVPMTIPELLDLRDRLVNHYHPNEGDVFEIDVQPFYDYSPIIRDAKNIGKGVEFLNRYLSSKLFQDPRQWQQNLFNFLRIHRYNGYQLLINERIRSPQHLSEQVKQALVVLSDRPPTEAYSEFRFELQNLGFEPGWGNTVARVRDTLEILDQLLDSPDHQVLEAFVSRIPMLFRIALISPHGWFGQEGVLGRPDTGGQVVYILDQVKSLEKQMREDLELAGLGVLEAQPKIIVLTRLIPNAEGTLCNQRLEKIYGTNDAWILRVPFREFNPKVTQNWISRFEIWPYLETFAIDAERELRAEFGHVPDLIIGNYSDGNLVAFLLARRLKVTQCNIAHALEKSKYLFSNLYWQDLEDKYHFSLQFTADLIAMNAANFIISSTYQEIVGTPDSIGQYESYQSFTMPDLYHVVNGIELFSPKFNVVPPGVNEQVYFPYYHYTERLEGDRQRLEELLFTLEDPQQIYGYLEAPEKRPIFSMSRLDRIKNQTGLMELVGRSKALQERCNLIVVAGKVRTADSSDREEIAEIEKIYQIIHQYNLHGKARWLGIRLPKADSGEIYRIIADRQGVFVQPALFEAFGLTILEAMISGLPTFGTRFGGPLEIIQDGVNGFYINPTHLEEMAETLVRFFEACDRDPQEWQRISKAGIERVYSTYTWKIHCTRLLSLAKIYGFWNFSSQENREDMMRYMEALFHLLYKPRAQALLAEHLQR

SEQ ID NO: 378 - protein, 808 aa, synthetic construct
MTCVLLKAVVESDERADLRQFSRILQLGEKRYLLRNDILDAFADYCRDQERPVPPPSESRLSKLVFYTQEIIVDNESLCWIVRPRIAQQEVCRLLVEDLTIVPMTIPELLDLRDRLVNHYHPNEGDVFEIDVQPFYDYSPIIRDAKNIGKGVEFLNRYLSSKLFQDPRQWQQNLFNFLRIHRYNGYQLLINERIRSPQHLSEQVKQALVVLSDRPPTEAYSEFRFELQNLGFEPGWGNTVARVRDTLEILDQLLDSPDHQVLEAFVSRIPMLFRIILISIHGWFGQEGVLGRPDTGGQVVYILDQVKSLEKQMREDLELAGLGVLEAQPKILVITRLIPNAEGTLCNQRLEKIYGTNDAWILRIPFREFNPKVTQNWISRFEIWPYLETWVIDVEREIRAELGHVPDLIIGNYSDGNLVAFLLARRWKVTQCNIAHALEKSKYLFSNLYWQDLEDKYHFSLQFTADLIAMNAANFIISSTYQEIVGTPDSIGQYESYQSFTMPDLYHVVNGIELFSPKFNVVPPGVNEQVYFPYYHYTERLEGDRQRLEELLFTLEDPQQIYGYLEAPEKRPLFSMARLDRIKNLTGLAEAFGRSKALQERCNLILVAGKLRTADSSDREEIAEIEKLYQIIHQYNLHGKIRWLGIRLPKADSGEIYRIIADRQGIFVQPALFEAFGLTILEAMISGLPTFGTRFGGPLEIIQDGVNGFYINPTHLEEMAETIVRFLEACDRDPQEWQRISKAGIERVYSTYTWKIHCTRLLSLAKIYGFWNFSSQENREDMMRYMEALFHLLYKPRAQALLAEHLQR

SEQ ID NO: 379 - protein, 808 aa, synthetic construct
MTCVLLKAVVESDERADLRQFSRILQLGEKRYLLRNDILDAFADYCRDQERPVPPPSESRLSKLVFYTQEIIVDNESLCWIVRPRIAQQEVCRLLVEDLTIVPMTIPELLDLRDRLVNHYHPNEGDVWEIDWQPLYDYSPIIRDAKNIGKGVEFLNRYLSSKLFQDPRQWQQNLFNFLRIHRYNGYQLLINERIRSPQHLSEQVKQALVVLSDRPPTEAYSEFRFELQNLGFEPGWGNTVARVRDTLEILDQLLDSPDHQVLEAFVSRIPMLFRVAIISPHGWFGQEGVLGRPDTGGQVVYILDQVKSLEKQMREDLELAGLGVLEAQPKIIILTRLIPNAEGTLCNQRLEKIYGTNDAWILRVPFREFNPKVTQNWISRFEIWPYLETFAIDAERELRAEFGHVPDVIIGNYSDGNLVAFLLARRLKVTQINIAHALEKSKYLFSNLYWQDLEDKYHFSLQFTADLIAMNAANAIVSSTYQEIVGTPDSIGQYESYQSFTMPDLYHIVNGIELFSPKFNVIPPGVNEQVYFPYYHYTERLEGDRQRLEELLFTLEDPQQIYGYLEAPEKRPIFSMSRLDRIKNQTGLMELVGRSKALQERCNLIVVAGKVRTADSSDREEIAEIEKIYQIIHQYNLHGKARWLGIRLPKADSGEIYRIIADRQGVFVQPALFEAFGLTILEAMISGLPTFGTRFGGPLEIIQDGVNGFYINPTHLEEMAETLVRFFEACDRDPQEWQRISKAGIERVYSTYTWKIYCTRMMSLAKIMGFWNFSSQENREDMMRYLEAIFHLLYKPRAQALLAEHLQR

SEQ ID NO: 380 - protein, 808 aa, synthetic construct
MTCVLLKAVVESDERADLRQFSRILQLGEKRYLLRNDILDAFADYCRDQERPVPPPSESRLSKLVFYTQEIIVDNESLCWIVRPRIAQQEVCRLLVEDLTIVPMTIPELLDLRDRLVNHYHPNEGDVWEIDWQPLYDYSPIIRDAKNIGKGVEFLNRYLSSKLFQDPRQWQQNLFNFLRIHRYNGYQLLINERIRSPQHLSEQVKQALVVLSDRPPTEAYSEFRFELQNLGFEPGWGNTVARVRDTLEILDQLLDSPDHQVLEAFVSRIPMLFRVIIISIHGWFGQEGVLGRPDTGGQVVYILDQVKSLEKQMREDLELAGLGVLEAQPKILIITRLIPNAEGTLCNQRLEKIYGTNDAWILRIPFREFNPKVTQNWISRFEIWPYLETWVIDVEREIRAELGHVPDVIIGNYSDGNLVAFLLARRWKVTQINIAHALEKSKYLFSNLYWQDLEDKYHFSLQFTADLIAMNAANAIVSSTYQEIVGTPDSIGQYESYQSFTMPDLYHIVNGIELFSPKFNVIPPGVNEQVYFPYYHYTERLEGDRQRLEELLFTLEDPQQIYGYLEAPEKRPLFSMARLDRIKNLTGLAEAFGRSKALQERCNLILVAGKLRTADSSDREEIAEIEKLYQIIHQYNLHGKIRWLGIRLPKADSGEIYRIIADRQGIFVQPALFEAFGLTILEAMISGLPTFGTRFGGPLEIIQDGVNGFYINPTHLEEMAETIVRFLEACDRDPQEWQRISKAGIERVYSTYTWKIYCTRMMSLAKIMGFWNFSSQENREDMMRYLEAIFHLLYKPRAQALLAEHLQR

SEQ ID NO: 381 - protein, 808 aa, synthetic construct
MTCVLLKAVVESDERADLRQFSRILQLGEKRYLLRNDILDAFADYCRDQERPVPPPSESRLSKLVFYTQEIIVDNESLCWIVRPRIAQQEVCRLLVEDLTIVPMTIPELLDLRDRLVNHYHPNEGDVWEIDWQPLYDYSPIIRDAKNIGKGVEFLNRYLSSKLFQDPRQWQQNLFNFLRIHRYNGYQLLINERIRSPQHLSEQVKQALVVLSDRPPTEAYSEFRFELQNLGFEPGWGNTVARVRDTLEILDQLLDSPDHQVLEAFVSRIPMLFRIILISIHGWFGQEGVLGRPDTGGQVVYILDQVKSLEKQMREDLELAGLGVLEAQPKILVITRLIPNAEGTLCNQRLEKIYGTNDAWILRIPFREFNPKVTQNWISRFEIWPYLETWVIDVEREIRAELGHVPDLIIGNYSDGNLVAFLLARRWKVTQCNIAHALEKSKYLFSNLYWQDLEDKYHFSLQFTADLIAMNAANFIISSTYQEIVGTPDSIGQYESYQSFTMPDLYHIVNGIELFSPKFNVVPPGVNEQVYFPYYHYTERLEGDRQRLEELLFTLEDPQQIYGYLEAPEKRPIFSMSRLDRIKNQTGLMELVGRSKALQERCNLIVVAGKVRTADSSDREEIAEIEKIYQIIHQYNLHGKARWLGIRLPKADSGEIYRIIADRQGVFVQPALFEAFGLTILEAMISGLPTFGTRFGGPLEIIQDGVNGFYINPTHLEEMAETLVRFFEACDRDPQEWQRISKAGIERVYSTYTWKIHCTRLLSLAKIYGFWNFSSQENREDMMRYLEAIFHLLYKPRAQALLAEHLQR

SEQ ID NO: 382 - protein, 808 aa, synthetic construct
MTCVLLKAVVESDERADLRQFSRILQLGEKRYLLRNDILDAFADYCRDQERPVPPPSESRLSKLVFYTQEIIVDNESLCWIVRPRIAQQEVCRLLVEDLTIVPMTIPELLDLRDRLVNHYHPNEGDVFEIDVQPFYDYSPIIRDAKNIGKGVEFLNRYLSSKLFQDPRQWQQNLFNFLRIHRYNGYQLLINERIRSPQHLSEQVKQALVVLSDRPPTEAYSEFRFELQNLGFEPGWGNTVARVRDTLEILDQLLDSPDHQVLEAFVSRIPMLFRVIIISIHGWFGQEGVLGRPDTGGQVVYILDQVKSLEKQMREDLELAGLGVLEAQPKILIITRLIPNAEGTLCNQRLEKIYGTNDAWILRIPFREFNPKVTQNWISRFEIWPYLETWVIDVEREIRAELGHVPDVIIGNYSDGNLVAFLLARRWKVTQINIAHALEKSKYLFSNLYWQDLEDKYHFSLQFTADLIAMNAANAIVSSTYQEIVGTPDSIGQYESYQSFTMPDLYHVVNGIELFSPKFNVIPPGVNEQVYFPYYHYTERLEGDRQRLEELLFTLEDPQQIYGYLEAPEKRPIFSMSRLDRIKNQTGLMELVGRSKALQERCNLIVVAGKVRTADSSDREEIAEIEKIYQIIHQYNLHGKARWLGIRLPKADSGEIYRIIADRQGVFVQPALFEAFGLTILEAMISGLPTFGTRFGGPLEIIQDGVNGFYINPTHLEEMAETLVRFFEACDRDPQEWQRISKAGIERVYSTYTWKIYCTRMMSLAKIMGFWNFSSQENREDMMRYMEALFHLLYKPRAQALLAEHLQR

SEQ ID NO: 383 - protein, 808 aa, synthetic construct
MTCVLLKAVVESDERADLRQFSRILQLGEKRYLLRNDILDAFADYCRDQERPVPPPSESRLSKLVFYTQEIIVDNESLCWIVRPRIAQQEVCRLLVEDLTIVPMTIPELLDLRDRLVNHYHPNEGDVWEIDWQPLYDYSPIIRDAKNIGKGVEFLNRYLSSKLFQDPRQWQQNLFNFLRIHRYNGYQLLINERIRSPQHLSEQVKQALVVLSDRPPTEAYSEFRFELQNLGFEPGWGNTVARVRDTLEILDQLLDSPDHQVLEAFVSRIPMLFRVIIISIHGWFGQEGVLGRPDTGGQVVYILDQVKSLEKQMREDLELAGLGVLEAQPKILIITRLIPNAEGTLCNQRLEKIYGTNDAWILRIPFREFNPKVTQNWISRFEIWPYLETWVIDVEREIRAELGHVPDVIIGNYSDGNLVAFLLARRWKVTQINIAHALEKSKYLFSNLYWQDLEDKYHFSLQFTADLIAMNAANAIVSSTYQEIVGTPDSIGQYESYQSFTMPDLYHIVNGIELFSPKFNVIPPGVNEQVYFPYYHYTERLEGDRQRLEELLFTLEDPQQIYGYLEAPEKRPIFSMSRLDRIKNQTGLMELVGRSKALQERCNLIVVAGKVRTADSSDREEIAEIEKIYQIIHQYNLHGKARWLGIRLPKADSGEIYRIIADRQGVFVQPALFEAFGLTILEAMISGLPTFGTRFGGPLEIIQDGVNGFYINPTHLEEMAETLVRFFEACDRDPQEWQRISKAGIERVYSTYTWKIYCTRMMSLAKIMGFWNFSSQENREDMMRYLEAIFHLLYKPRAQALLAEHLQR

SEQ ID NO: 384 - protein, 808 aa, synthetic construct
MTCVLLKAVVESDERADLRQFSRILQLGEKRYLLRNDILDAFADYCRDQERPVPPPSESRLSKLVFYTQEIIVDNESLCWIVRPRIAQQEVCRLLVEDLTIVPMTIPELLDLRDRLVNHYHPNEGDVFEIDVQPFYDYSPIIRDAKNIGKGVEFLNRYLSSKLFQDPRQWQQNLFNFLRIHRYNGYQLLINERIRSPQHLSEQVKQALVVLSDRPPTEAYSEFRFELQNLGFEPGWGNTVARVRDTLEILDQLLDSPDHQVLEAFVSRIPMLFRIALISPHGWFGQEGVLGRPDTGGQVVYILDQVKSLEKQMREDLELAGLGVLEAQPKIIVLTRLIPNAEGTLCNQRLEKIYGTNDAWILRVPFREFNPKVTQNWISRFEIWPYLETFAIDAERELRAEFGHVPDLIIGNYSDGNLVAFLLARRLKVTQCNIAHALEKSKYLFSNLYWQDLEDKYHFSLQFTADLIAMNAANFIISSTYQEIVGTPDSIGQYESYQSFTMPDLYHVVNGIELFSPKFNVVPPGVNEQVYFPYYHYTERLEGDRQRLEELLFTLEDPQQIYGYLEAPEKRPLFSMARLDRIKNLTGLAEAFGRSKALQERCNLILVAGKVRTADSSDREEIAEIEKLYQIIHQYNLNGKIRWLGIRLPKADSGEIYRIIADRQGIFVQPALFEAFGLTILEAMITGLPTFGTQFGGPLEIIQDGVNGFYINPTHLEETAETIVRFIEACDRDPQEWQRISKAGIERVYSKYTWKIHTSRLLSLAKIYGFWNFSSQENREDLMRYMEALFHLLYKPRAQALLAEHLQR

SEQ ID NO: 385 - protein, 808 aa, synthetic construct
MTCVLLKAVVESDERADLRQFSRILQLGEKRYLLRNDILDAFADYCRDQERPVPPPSESRLSKLVFYTQEIIVDNESLCWIVRPRIAQQEVCRLLVEDLTIVPMTIPELLDLRDRLVNHYHPNEGDVFEIDVQPFYDYSPIIRDAKNIGKGVEFLNRYLSSKLFQDPRQWQQNLFNFLRIHRYNGYQLLINERIRSPQHLSEQVKQALVVLSDRPPTEAYSEFRFELQNLGFEPGWGNTVARVRDTLEILDQLLDSPDHQVLEAFVSRIPMLFRIALISPHGWFGQEGVLGRPDTGGQVVYILDQVKSLEKQMREDLELAGLGVLEAQPKIIVLTRLIPNAEGTLCNQRLEKIYGTNDAWILRVPFREFNPKVTQNWISRFEIWPYLETFAIDAERELRAEFGHVPDLIIGNYSDGNLVAFLLARRLKVTQCNIAHALEKSKYLFSNLYWQDLEDKYHFSLQFTADLIAMNAANFIISSTYQEIVGTPDSIGQYESYQSFTMPDLYHVVNGIELFSPKFNVVPPGVNEQVYFPYYHRTERLEGDAQRLEELLFTLEDPQQIYGYLEAPEKRPLFSMARLDRIKNLTGLAEAFGRSKALQERCNLILVAGKVRPAGSSDREEIAEIEKLYQIIHEYNLHGKIRWLGIRLPKADSGEIYRIIADRQGIFVQPALFEAFGLTILEAMISGLPTFGTQFGGPLEIIQDGVNGFYINPTHLEEMAEAIVRFIEACDRDPQEWQRISKAGIQRVYSTYTWKIHTTRLLSLAKIYGFWNFSSQENREDLMRYMEALFHLLFKPRAQALLAEHLQR

SEQ ID NO: 386 - protein, 808 aa, synthetic construct
MTCVLLKAVVESDERADLRQFSRILQLGEKRYLLRNDILDAFADYCRDQERPVPPPSESRLSKLVFYTQEIIVDNESLCWIVRPRIAQQEVCRLLVEDLTIVPMTIPELLDLRDRLVNHYHPNEGDVFEIDVQPFYDYSPIIRDAKNIGKGVEFLNRYLSSKLFQDPRQWQQNLFNFLRIHRYNGYQLLINERIRSPQHLSEQVKQALVVLSDRPPTEAYSEFRFELQNLGFEPGWGNTVARVRDTLEILDQLLDSPDHQVLEAFVSRIPMLFRIALISPHGWFGQEGVLGRPDTGGQVVYILDQVKSLEKQMREDLELAGLGVLEAQPKIIVLTRLIPNAEGTLCNQRLEKIYGTNDAWILRVPFREFNPKVTQNWISRFEIWPYLETFAIDAERELRAEFGHVPDLIIGNYSDGNLVAFLLARRLKVTQCNIAHALEKSKYLFSNLYWQDLEDKYHFSLQFTADLIAMNAANFIISSTYQEIVGTPDSIGQYESYQSFTMPDLYHVVNGIELFSPKFNVVPPGVNEQVYFPYYHYTERLEGERQRLEELLFTLEDPQQIYGYLEAPHKRPLFSMARLDRIKNLTGLAEAFGRSKALQERCNLILVAGKVRTEDSSDREEIAEIEKLYQIIHQYNLKGKIRWLGIRLPKADSGEIYRIIADRGGIFVQPALFEAFGLTILEAMITGLPTFATRFGGPLEIIQDGVNGFYINPTHLEETAETILRFLEACDRDPQEWQRISKAGIERVYSKYTWKIHTSRLLSLAKIYGFWNFSSQENREDMMRYMEALFHLLYKPRAQALLAEHLQR

SEQ ID NO: 387 - protein, 808 aa, synthetic construct
MTCVLLKAVVESDERADLRQFSRILQLGEKRYLLRNDILDAFADYCRDQERPVPPPSESRLSKLVFYTQEIIVDNESLCWIVRPRIAQQEVCRLLVEDLTIVPMTIPELLDLRDRLVNHYHPNEGDVFEIDVQPFYDYSPIIRDAKNIGKGVEFLNRYLSSKLFQDPRQWQQNLFNFLRIHRYNGYQLLINERIRSPQHLSEQVKQALVVLSDRPPTEAYSEFRFELQNLGFEPGWGNTVARVRDTLEILDQLLDSPDHQVLEAFVSRIPMLFRIALISPHGWFGQEGVLGRPDTGGQVVYILDQVKSLEKQMREDLELAGLGVLEAQPKIIVLTRLIPNAEGTLCNQRLEKIYGTNDAWILRVPFREFNPKVTQNWISRFEIWPYLETFAIDAERELRAEFGHVPDLIIGNYSDGNLVAFLLARRLKVTQCNIAHALEKSKYLFSNLYWQDLEDKYHFSLQFTADLIAMNAANFIISSTYQEIVGTPDSIGQYESYQSFTMPDLYHVVNGIELFSPKFNVVPPGVNEQVYFPYYHRTERLEGDRQRLEELLFTLEDPQQIYGYLEAPEKRPLFSMARLDRIKNLTGLAEAFGRSQALQERCNLILVAGKVRTADSSDREEIAEIEKLYQIIHQYNLNGKIRWLGIRLPKIDSGEVYRIIADRQGIFVQPALFEAFGLTILEAMITGLPTFATQFGGPLEIIQDGVNGFYINPTHLEETAETIMRFLEACDRDPQEWQRISKAGIERVYSKYTWKIHCSRLLSLAKIYGFWNFSSQENREDLMRYMEALFHLLYKPRAQALLAEHLQR

SEQ ID NO: 388 - protein, 808 aa, synthetic construct
MTCVLLKAVVESDERADLRQFSRILQLGEKRYLLRNDILDAFADYCRDQERPVPPPSESRLSKLVFYTQEIIVDNESLCWIVRPRIAQQEVCRLLVEDLTIVPMTIPELLDLRDRLVNHYHPNEGDVFEIDVQPFYDYSPIIRDAKNIGKGVEFLNRYLSSKLFQDPRQWQQNLFNFLRIHRYNGYQLLINERIRSPQHLSEQVKQALVVLSDRPPTEAYSEFRFELQNLGFEPGWGNTVARVRDTLEILDQLLDSPDHQVLEAFVSRIPMLFRIALISPHGWFGQEGVLGRPDTGGQVVYILDQVKSLEKQMREDLELAGLGVLEAQPKIIVLTRLIPNAEGTLCNQRLEKIYGTNDAWILRVPFREFNPKVTQNWISRFEIWPYLETFAIDAERELRAEFGHVPDLIIGNYSDGNLVAFLLARRLKVTQCNIAHALEKSKYLFSNLYWQDLEDKYHFSLQFTADLIAMNAANFIISSTYQEIVGTPDSIGQYESYQSFTMPDLYHVVNGIELFSPKFNVVPPGVNEQVYFPYYHYTERLEGDRQRLEELLFTLEDPQQIYGYLEAPHKRPLFSMARLDRIKNLTGLAEAFGRSKALQERCNLILVAGKVRTEDSSDREEIAEIEKLYQIIHQYNLQGKIRWLGIRLPKADSGEIYRIIADRQGIFVQPALFEAFGLTILEAMITGLPTFGTRFGGPLEIIQDGVNGFYINPTHLEETAETIFRFIEACDRDPQQWQEISKAGIQRVYSTYTWKIHTSRLLSLAKIYGFWNFSSQENREDLMRYMEALFHLLYKPRAQALLAEHLQR

SEQ ID NO: 389 - protein, 808 aa, synthetic construct
MTCVLLKAVVESDERADLRQFSRILQLGEKRYLLRNDILDAFADYCRDQERPVPPPSESRLSKLVFYTQEIIVDNESLCWIVRPRIAQQEVCRLLVEDLTIVPMTIPELLDLRDRLVNHYHPNEGDVFEIDVQPFYDYSPIIRDAKNIGKGVEFLNRYLSSKLFQDPRQWQQNLFNFLRIHRYNGYQLLINERIRSPQHLSEQVKQALVVLSDRPPTEAYSEFRFELQNLGFEPGWGNTVARVRDTLEILDQLLDSPDHQVLEAFVSRIPMLFRIALISPHGWFGQEGVLGRPDTGGQVVYILDQVKSLEKQMREDLELAGLGVLEAQPKIIVLTRLIPNAEGTLCNQRLEKIYGTNDAWILRVPFREFNPKVTQNWISRFEIWPYLETFAIDAERELRAEFGHVPDLIIGNYSDGNLVAFLLARRLKVTQCNIAHALEKSKYLFSNLYWQDLEDKYHFSLQFTADLIAMNAANFIISSTYQEIVGTPDSIGQYESYQSFTMPDLYHVVNGIELFSPKFNVVPPGVNEQVYFPYYHRTERLENERQRLEELLFTLEDPQQIYGYLEAPEKRPLFSMARLDRIKNLTGLAEAFGRSKALQERCNLILVAGKVRPAGSSDREEIAEIEKLYQIIHQYNLHGKIRWLGIRLPKADSGEIYRIIADRQGIFVQPALFEAFGLTILEAMISGLPTFGTQFGGPLEIIQDGVNGFYINPTHLEEMAEAIVRFIEACDRDPQEWQRISKAGIQRVYSNYTWKIHTTRLLSLAKIYGFWNFSSQENREDLMRYMEALFHLLYKPRAQALLAEHLQR

SEQ ID NO: 390 - protein, 808 aa, synthetic construct
MTCVLLKAVVESDERADLRQFSRILQLGEKRYLLRNDILDAFADYCRDQERPVPPPSESRLSKLVFYTQEIIVDNESLCWIVRPRIAQQEVCRLLVEDLTIVPMTIPELLDLRDRLVNHYHPNEGDVFEIDVQPFYDYSPIIRDAKNIGKGVEFLNRYLSSKLFQDPRQWQQNLFNFLRIHRYNGYQLLINERIRSPQHLSEQVKQALVVLSDRPPTEAYSEFRFELQNLGFEPGWGNTVARVRDTLEILDQLLDSPDHQVLEAFVSRIPMLFRIALISPHGWFGQEGVLGRPDTGGQVVYILDQVKSLEKQMREDLELAGLGVLEAQPKIIVLTRLIPNAEGTLCNQRLEKIYGTNDAWILRVPFREFNPKVTQNWISRFEIWPYLETFAIDAERELRAEFGHVPDLIIGNYSDGNLVAFLLARRLKVTQCNIAHALEKSKYLFSNLYWQDLEDKYHFSLQFTADLIAMNAANFIISSTYQEIVGTPDSIGQYESYQSFTMPDLYHVVNGIELFSPKFNVVPPGVNEQVYFPYYHRTERLEGDRQRLEELLFTLEDPQQIYGYLEAPHKRPLFSMARLDRIKNLTGLAEAFGRSKALQERCNLILVAGKVRTEDSSDREEIAEIEKLYQIIHQYNLNGKIRWLGIRLPKADSGEIYRIIADRQGIFVQPALFEAFGLTILEAMITGLPTFATQFGGPLEIIQDGVNGFYINPTHLEETAETIVRFIEACDRDPQEWQRISKAGIQRVYSKYTWKIHTSRLLSLAKIYGFWNFSSQENREDLMRYMEALFHLLYKPRAQALLAEHLQR

SEQ ID NO: 391 - protein, 808 aa, synthetic construct
MTCVLLKAVVESDERADLRQFSRILQLGEKRYLLRNDILDAFADYCRDQERPVPPPSESRLSKLVFYTQEIIVDNESLCWIVRPRIAQQEVCRLLVEDLTIVPMTIPELLDLRDRLVNHYHPNEGDVFEIDVQPFYDYSPIIRDAKNIGKGVEFLNRYLSSKLFQDPRQWQQNLFNFLRIHRYNGYQLLINERIRSPQHLSEQVKQALVVLSDRPPTEAYSEFRFELQNLGFEPGWGNTVARVRDTLEILDQLLDSPDHQVLEAFVSRIPMLFRIALISPHGWFGQEGVLGRPDTGGQVVYILDQVKSLEKQMREDLELAGLGVLEAQPKIIVLTRLIPNAEGTLCNQRLEKIYGTNDAWILRVPFREFNPKVTQNWISRFEIWPYLETFAIDAERELRAEFGHVPDLIIGNYSDGNLVAFLLARRLKVTQCNIAHALEKSKYLFSNLYWQDLEDKYHFSLQFTADLIAMNAANFIISSTYQEIVGTPDSIGQYESYQSFTMPDLYHVVNGIELFSPKFNVVPPGVNEQVYFPYYHRTERLEGERQRLEELLFTLEDPQQIYGYLEAPHKRPLFSMARLDRIKNLTGLAEAFGKSKALQERCNLILVAGKVRTAGSSDREEIAEIEKLYQIIHQYNLHGKIRWLGIRLPKADSGEVYRIIADRQGIFVQPALFEAFGLTILEAMITGLPTFGTQFGGPLEIIQDGVNGFYINPTHLEETAEAIVRFLEACDRDPQQWQEISKAGIERVYSTYTWKIHTSRLLSLAKIYGFWNFSSQENREDLMRYIEALFHLLYKPRAQALLAEHLQR

SEQ ID NO: 392 - protein, 808 aa, synthetic construct
MTCVLLKAVVESDERADLRQFSRILQLGEKRYLLRNDILDAFADYCRDQERPVPPPSESRLSKLVFYTQEIIVDNESLCWIVRPRIAQQEVCRLLVEDLTIVPMTIPELLDLRDRLVNHYHPNEGDVFEIDVQPFYDYSPIIRDAKNIGKGVEFLNRYLSSKLFQDPRQWQQNLFNFLRIHRYNGYQLLINERIRSPQHLSEQVKQALVVLSDRPPTEAYSEFRFELQNLGFEPGWGNTVARVRDTLEILDQLLDSPDHQVLEAFVSRIPMLFRIALISPHGWFGQEGVLGRPDTGGQVVYILDQVKSLEKQMREDLELAGLGVLEAQPKIIVLTRLIPNAEGTLCNQRLEKIYGTNDAWILRVPFREFNPKVTQNWISRFEIWPYLETFAIDAERELRAEFGHVPDLIIGNYSDGNLVAFLLARRLKVTQCNIAHALEKSKYLFSNLYWQDLEDKYHFSLQFTADLIAMNAANFIISSTYQEIVGTPDSIGQYESYQSFTMPDLYHVVNGIELFSPKFNVVPPGVNEQVYFPYYHYTERLEGDAQRLEELLFTLEDPQQIYGYLEAPEKRPLFSMARLDRIKNLTGLAEAFGRSQALQERCNLILVAGKVRPADSSDREEIAEIEKLYQIIHQYNLSGKIRWLGIRLPKADSGEIYRIIADRQGIFVQPALFEAFGLTILEAMISGLPTFGTQFGGPLEIIQDGVNGFYINPTHLEETAEAIMRFIEACDRDPQEWQRISKAGIQRVYSTYTWKIHTSRLLSLAKIYGFWNFSSQENREDLMRYMEALFHLLFKPRAQALLAEHLQR

SEQ ID NO: 393 - protein, 808 aa, synthetic construct
MTCVLLKAVVESDERADLRQFSRILQLGEKRYLLRNDILDAFADYCRDQERPVPPPSESRLSKLVFYTQEIIVDNESLCWIVRPRIAQQEVCRLLVEDLTIVPMTIPELLDLRDRLVNHYHPNEGDVFEIDVQPFYDYSPIIRDAKNIGKGVEFLNRYLSSKLFQDPRQWQQNLFNFLRIHRYNGYQLLINERIRSPQHLSEQVKQALVVLSDRPPTEAYSEFRFELQNLGFEPGWGNTVARVRDTLEILDQLLDSPDHQVLEAFVSRIPMLFRIALISPHGWFGQEGVLGRPDTGGQVVYILDQVKSLEKQMREDLELAGLGVLEAQPKIIVLTRLIPNAEGTLCNQRLEKIYGTNDAWILRVPFREFNPKVTQNWISRFEIWPYLETFAIDAERELRAEFGHVPDLIIGNYSDGNLVAFLLARRLKVTQCNIAHALEKSKYLFSNLYWQDLEDKYHFSLQFTADLIAMNAANFIISSTYQEIVGTPDSIGQYESYQSFTMPDLYHVVNGIELFSPKFNVVPPGVNEQVYFPYYHRTERLEGERQRLEELLFTLEDPQQIYGYLEAPHKRPLFSMARLDRIKNLTGLAEAFGRSKALQERCNLILVAGKVRTEDSSDREEIAEIEKLYQIIHEYNLNGKIRWLGIRLPKIDSGEIYRIIADRGGIFVQPALFEAFGLTILESMITGLPTFATRFGGPLEIIQDGVNGFYINPTHLEETAETILRFLEACDRDPQEWQRISKAGIQRVYSKYTWKIHTSRLLSLAKIYGFWNFSSQENREDMMRYMEALFHLLYKPRAQQLLAEHLQR

SEQ ID NO: 394 - protein, 808 aa, synthetic construct
MTCVLLKAVVESDERADLRQFSRILQLGEKRYLLRNDILDAFADYCRDQERPVPPPSESRLSKLVFYTQEIIVDNESLCWIVRPRIAQQEVCRLLVEDLTIVPMTIPELLDLRDRLVNHYHPNEGDVFEIDVQPFYDYSPIIRDAKNIGKGVEFLNRYLSSKLFQDPRQWQQNLFNFLRIHRYNGYQLLINERIRSPQHLSEQVKQALVVLSDRPPTEAYSEFRFELQNLGFEPGWGNTVARVRDTLEILDQLLDSPDHQVLEAFVSRIPMLFRIALISPHGWFGQEGVLGRPDTGGQVVYILDQVKSLEKQMREDLELAGLGVLEAQPKIIVLTRLIPNAEGTLCNQRLEKIYGTNDAWILRVPFREFNPKVTQNWISRFEIWPYLETFAIDAERELRAEFGHVPDLIIGNYSDGNLVAFLLARRLKVTQCNIAHALEKSKYLFSNLYWQDLEDKYHFSLQFTADLIAMNAANFIISSTYQEIVGTPDSIGQYESYQSFTMPDLYHVVNGIELFSPKFNVVPPGVNEQVYFPYYHRTERLEGDRQRLEELLFTLEDPQQIYGYLEAPEKRPLFSMARLDRIKNLTGLAEAFGRSKALQERCNLILVAGKVRTEDSSDREEIAEIEKLYQIIHEYQLQGKIRWLGIRLPKADSGEIYRIIADRGGIFVQPALFEAFGLTILEAMISGLPTFGTQFGGPLEIIQDGVNGFYINPTDLEETAETIVRFIEACDRDPQEWQRISKAGIERVYSKYTWKIHCSRLLSLSKIYGFWNFSSQENREDLMRYMEALFHLLYKPRAQALLAEHLQR

SEQ ID NO: 395 - protein, 808 aa, synthetic construct
MTCVLLKAVVESDERADLRQFSRILQLGEKRYLLRNDILDAFADYCRDQERPVPPPSESRLSKLVFYTQEIIVDNESLCWIVRPRIAQQEVCRLLVEDLTIVPMTIPELLDLRDRLVNHYHPNEGDVFEIDVQPFYDYSPIIRDAKNIGKGVEFLNRYLSSKLFQDPRQWQQNLFNFLRIHRYNGYQLLINERIRSPQHLSEQVKQALVVLSDRPPTEAYSEFRFELQNLGFEPGWGNTVARVRDTLEILDQLLDSPDHQVLEAFVSRIPMLFRIALISPHGWFGQEGVLGRPDTGGQVVYILDQVKSLEKQMREDLELAGLGVLEAQPKIIVLTRLIPNAEGTLCNQRLEKIYGTNDAWILRVPFREFNPKVTQNWISRFEIWPYLETFAIDAERELRAEFGHVPDLIIGNYSDGNLVAFLLARRLKVTQCNIAHALEKSKYLFSNLYWQDLEDKYHFSLQFTADLIAMNAANFIISSTYQEIVGTPDSIGQYESYQSFTMPDLYHVVNGIELFSPKFNVVPPGVNEQVYFPYYHRTERLEGERQRLEELLFTLEDPQQIYGYLEAPHKRPLFSMARLDRIKNLTGLAEAFGRSKALQERCNLILVAGKVRPEDSSDREEIAEIEKLYQIIHEYNLNGKIRWLGIRLPKADSGEIYRIIADRQGIFVQPALFEAFGLTILEAMITGLPTFATQFGGPLEIIQDGVNGFYINPTHLEETAETILRFIEACDRDPQEWQRISKAGIQRVYSKYTWKIHTSRLLSLAKIYGFWNFSSQENREDLMRYMEALFHLLYKPRAQQLLAEHLQR

SEQ ID NO: 396 - protein, 808 aa, synthetic construct
MTCVLLKAVVESDERADLRQFSRILQLGEKRYLLRNDILDAFADYCRDQERPVPPPSESRLSKLVFYTQEIIVDNESLCWIVRPRIAQQEVCRLLVEDLTIVPMTIPELLDLRDRLVNHYHPNEGDVFEIDVQPFYDYSPIIRDAKNIGKGVEFLNRYLSSKLFQDPRQWQQNLFNFLRIHRYNGYQLLINERIRSPQHLSEQVKQALVVLSDRPPTEAYSEFRFELQNLGFEPGWGNTVARVRDTLEILDQLLDSPDHQVLEAFVSRIPMLFRIALISPHGWFGQEGVLGRPDTGGQVVYILDQVKSLEKQMREDLELAGLGVLEAQPKIIVLTRLIPNAEGTLCNQRLEKIYGTNDAWILRVPFREFNPKVTQNWISRFEIWPYLETFAIDAERELRAEFGHVPDLIIGNYSDGNLVAFLLARRLKVTQCNIAHALEKSKYLFSNLYWQDLEDKYHFSLQFTADLIAMNAANFIISSTYQEIVGTPDSIGQYESYQSFTMPDLYHVVNGIELFSPKFNVVPPGVNEQVYFPYYHRTERLENERQRLEELLFTLEDPQQIYGYLEAPEKRPLFSMARLDRIKNLTGLAEAFGRSQALQERCNLILVAGKVDPAGSSDREEIAEIEKLYQIIHQYNLNGKIRWLGIRLPKADSGEIYRIIADRQGIFVQPALFEAFGLTILEAMISGLPTFATQFGGPLEIIQDGVNGFYINPTHLEETAEAILRFIEACDRDPQEWQRISKAAIERVYSTYTWKIHTSRLLSLAKIYGFWNFSSQENREDLMRYMEALFHLLFKPRAQALLAEHLQR

SEQ ID NO: 397 - protein, 808 aa, synthetic construct
MTCVLLKAVVESDERADLRQFSRILQLGEKRYLLRNDILDAFADYCRDQERPVPPPSESRLSKLVFYTQEIIVDNESLCWIVRPRIAQQEVCRLLVEDLTIVPMTIPELLDLRDRLVNHYHPNEGDVFEIDVQPFYDYSPIIRDAKNIGKGVEFLNRYLSSKLFQDPRQWQQNLFNFLRIHRYNGYQLLINERIRSPQHLSEQVKQALVVLSDRPPTEAYSEFRFELQNLGFEPGWGNTVARVRDTLEILDQLLDSPDHQVLEAFVSRIPMLFRIALISPHGWFGQEGVLGRPDTGGQVVYILDQVKSLEKQMREDLELAGLGVLEAQPKIIVLTRLIPNAEGTLCNQRLEKIYGTNDAWILRVPFREFNPKVTQNWISRFEIWPYLETFAIDAERELRAEFGHVPDLIIGNYSDGNLVAFLLARRLKVTQCNIAHALEKSKYLFSNLYWQDLEDKYHFSLQFTADLIAMNAANFIISSTYQEIVGTPDSIGQYESYQSFTMPDLYHVVNGIELFSPKFNVVPPGVNEQVYFPYYHRTERLEGDRQRLEELLFTLEDPQQIYGYLEAPEKRPLFSMARLDRIKNLTGLAEAFGRSKALQERCNLILVAGKVRTADSSDREEIAEIEKLYQIIHQYNLNGKIRWLGIRLPKADSGEVYRVIADRQGIFVQPALFEAFGLTILESMITGLPTFGTQFGGPLEIIQDGVNGFYINPTHLEETAEAIVKFIEACDRDPQQWQEISKAGIQRVYSKYTWKIHTSRLLSLAKIYGFWNFSSQENREDLLRYMEALFHLLYKPRAQALLAEHLQR

SEQ ID NO: 398 - protein, 808 aa, synthetic construct
MTCVLLKAVVESDERADLRQFSRILQLGEKRYLLRNDILDAFADYCRDQERPVPPPSESRLSKLVFYTQEIIVDNESLCWIVRPRIAQQEVCRLLVEDLTIVPMTIPELLDLRDRLVNHYHPNEGDVFEIDVQPFYDYSPIIRDAKNIGKGVEFLNRYLSSKLFQDPRQWQQNLFNFLRIHRYNGYQLLINERIRSPQHLSEQVKQALVVLSDRPPTEAYSEFRFELQNLGFEPGWGNTVARVRDTLEILDQLLDSPDHQVLEAFVSRIPMLFRIALISPHGWFGQEGVLGRPDTGGQVVYILDQVKSLEKQMREDLELAGLGVLEAQPKIIVLTRLIPNAEGTLCNQRLEKIYGTNDAWILRVPFREFNPKVTQNWISRFEIWPYLETFAIDAERELRAEFGHVPDLIIGNYSDGNLVAFLLARRLKVTQCNIAHALEKSKYLFSNLYWQDLEDKYHFSLQFTADLIAMNAANFIISSTYQEIVGTPDSIGQYESYQSFTMPDLYHVVNGIELFSPKFNVVPPGVNEQVYFPYYHNTERLEGERQRLEELLFTLEDPQQIYGYLEAPHKRPLFSMARLDRIKNLTGLAEAFGRSKALQERCNLILVAGKVRTEGSSDREEIAEIEKLYQIIHEYNLQGKIRWLGIRLPKADSGEIYRIIADRQGIFVQPALFEAFGLTILEAMITGLPTFATQFGGPLEIIQDGVNGFYINPTHLEETAETILKFIEACDRDPQEWQRISKKGIQRVYSKYTWKIHTSRLLSLSKIYGFWNFSSQENREDLMRYIEALFHLLYKPRAQQLLAEHLQR

SEQ ID NO: 399 - protein, 808 aa, synthetic construct
MTCVLLKAVVESDERADLRQFSRILQLGEKRYLLRNDILDAFADYCRDQERPVPPPSESRLSKLVFYTQEIIVDNESLCWIVRPRIAQQEVCRLLVEDLTIVPMTIPELLDLRDRLVNHYHPNEGDVFEIDVQPFYDYSPIIRDAKNIGKGVEFLNRYLSSKLFQDPRQWQQNLFNFLRIHRYNGYQLLINERIRSPQHLSEQVKQALVVLSDRPPTEAYSEFRFELQNLGFEPGWGNTVARVRDTLEILDQLLDSPDHQVLEAFVSRIPMLFRIALISPHGWFGQEGVLGRPDTGGQVVYILDQVKSLEKQMREDLELAGLGVLEAQPKIIVLTRLIPNAEGTLCNQRLEKIYGTNDAWILRVPFREFNPKVTQNWISRFEIWPYLETFAIDAERELRAEFGHVPDLIIGNYSDGNLVAFLLARRLKVTQCNIAHALEKSKYLFSNLYWQDLEDKYHFSLQFTADLIAMNAANFIISSTYQEIVGTPDSIGQYESYQSFTMPDLYHVVNGIELFSPKFNVVPPGVNEQVYFPYYHRTERLEGDAQRLEELLFTLEDPQQIYGYLEAPKKRPLFSMARLDRIKNLTGLAEAFGRSKALQERCNLILVAGKVRPAGSSDREEIAEIEKLYQIIHQYNLHGKIRWLGIRLPKADSGEIYRIIADRQGIFVQPALFEAFGLTILEAMITGLPTFGTQFGGPLEIIQDGVNGFYINPTHLEETAEAIVRFIAACDRDPNQWQEISKAGIQRVYSKYTWKIHTSRLLSLAKIYGFWNFSSQENREDLMRYMEALFHLLFKPRAQALLAEHLQR

SEQ ID NO: 400 - protein, 808 aa, synthetic construct
MTCVLLESVVESDERADLRQFSRILQLGEKGYLLRNDILDAFADYCRNQDRPVPPPSESRLSKLVFYTQEIIVDNESLCWIIRPRIAQQEVCRLLVEDLTIVPMTIPELLDLRDRLVNHYHPNEGDVFEIDVQPFYDYSPIIRDAKNIGKGVEFLNRYLSSKLFQDPRQWQQNLFNFLQIHRYNGYQLLINERIRSPQHLSEQVKQALVVLSDRAPAEAYSEFRFELQNLGFEPGWGNTVARVRDTLEILDQLLDSPDHQVLEAFVSRIPMLFRIALISPHGWFGQEGVLGRPDTGGQVVYILDQVKSLEKQMREDLELAGLGVLEARPKIIVLTRLIPNAEGTLCNQRLEKIYGTNDAWILRVPFREFNPKVTQNWISRFEIWPYLETFAIDAERELRAEFGHVPDLIIGNYSDGNLVAFLLARRLKVTQCNIAHALEKSKYLFSNLYWQDLEDKYHFSLQFTADLIAMNAANFIISSTYQEIVGTPDSIGQYESYQSFTMPDLYHVVNGIELFSPKFNVVPPGVNEQVYFPYYHYTERLEGDRQRLEELLFTLEDPQQIYGYLEAPEKRPLFSMARLDRIKNLTGLAEAFGRSKALQERCNLILVAGKLRTADSSDREEIAEIEKLYQIIHQYNLHGKIRWLGIRLPKADSGEIYRIIADRQGIFVQPALFEAFGLTILEAMISGLPTFGTRFGGPLEIIQDGVNGFYINPTHLEEMAETIVRFLEACDRDPQEWQRISKAGIERVYSTYTWKIHCTRLLSLAKIYGFWNFSSQENREDMMRYMEALFHLLYKPRAQALLAEHLQR

SEQ ID NO: 401 - protein, 808 aa, synthetic construct
MTSELLKAVVESDERADLRQFSRILQLGEKRYLLRNDILQAFADYCRDQQRPVPFPSESGLSKLVFYTQEIIVDNESLCWIVRPRIAQQEVCRLLVEDLTIVPMTIPELLDLRDRLVNHYHPNEGDVFEIDVQPFYDYSPIIRDAKNIGKGVEFLNRYLSSKLFQDPRQWQQNLFNFLRIHRYNGYQLLINERIRSPQHLSEQVKQALVVLSDRAPAEAYSEFRFELQNLGFEPGWGNTVARVRDTLEILDQLLDSPDHQVLEAFVSRIPMLFRIALISPHGWFGQEGVLGRPDTGGQVVYILDQVKSLEKQMREDLELAGLGVLEARPKIIVLTRLIPNAEGTLCNQRLEKIYGTNDAWILRVPFREFNPKVTQNWISRFEIWPYLETFAIDAERELLAEFGHVPDLIIGNYSDGNLVAFLLARRLKVTQCNIAHALEKSKYLFSNLYWQDLEDKYHFSLQFTADLIAMNAANFIISSTYQEIVGTPDSIGQYESYQSFTMPDLYHVVNGIELFSPKFNVVPPGVNEQVYFPYYHYTERLEGDRQRLEELLFTLEDPQQIYGYLEAPEKRPLFSMARLDRIKNLTGLAEAFGRSKALQERCNLILVAGKLRTADSSDREEIAEIEKLYQIIHQYNLHGKIRWLGIRLPKADSGEIYRIIADRQGIFVQPALFEAFGLTILEAMISGLPTFGTRFGGPLEIIQDGVNGFYINPTHLEEMAETIVRFLEACDRDPQEWQRISKAGIERVYSTYTWKIHCTRLLSLAKIYGFWNFSSQENREDMMRYMEALFHLLYKPRAQALLAEHLQR

SEQ ID NO: 402 - protein, 808 aa, synthetic construct
MTSVLLKSVVESDERADLRQFSRILQLGEKRYLLRNDILGAFADYCRAQDRPVPTPSESRLSKLVFYTQEIIVDNESLCWIIRPRIAQQEVCRLLVEDLTIVPMTIPELLDLRDRLVNHYHPNEGDVFEIDVQPFYDYSPIIRDAKNIGKGVEFLNRYLSSKLFQDPRQWQQNLFNFLQIHRYNGYQLLINERIRSPQHLSEQVKQALVALSDRAPAEAYSEFRFELQNLGFEPGWGNTAARVRDTLEILDQLLDSPDHQVLEAFVSRIPMLFRIALISPHGWFGQEGVLGRPDTGGQVVYILDQVKSLEKQMREDLELAGLGVLEARPKIIVLTRLIPNAEGTLCNQRLEKIYGTNDAWILRVPFREFNPKVTQNWISRFEIWPYLETFAIDAERELRAEFGHVPDLIIGNYSDGNLVAFLLARRLKVTQCNIAHALEKSKYLFSNLYWQDLEDKYHFSMQFTADLIAMNAANFIISSTYQEIVGTPDSIGQYESYQSFTMPDLYHVVNGIELFSPKFNVVPPGVNEQVYFPYYHYTERLEGDRQRLEELLFTLEDPQQIYGYLEAPEKRPLFSMARLDRIKNLTGLAEAFGRSKALQERCNLILVAGKLRTADSSDREEIAEIEKLYQIIHQYNLHGKIRWLGIRLPKADSGEIYRIIADRQGIFVQPALFEAFGLTILEAMISGLPTFGTRFGGPLEIIQDGVNGFYINPTHLEEMAETIVRFLEACDRDPQEWQRISKAGIERVYSTYTWKIHCTRLLSLAKIYGFWNFSSQENREDMMRYMEALFHLLYKPRAQALLAEHLQR

SEQ ID NO: 403 - protein, 808 aa, synthetic construct
MTCVLLESVVNSDERADLRQFSRILQLGEKRYLLRNDILDAFADYCRNQERPVPPPDESRLSKLVFYTQEIIVDNESLCWIVRPQIAQQEVCRLLVEDLTIVPMTIPELLDLRDRLVNHYHPNEGDVFEIDVQPFYDYSPIIRDAKNIGKGVEFLNRYLSSKLFQDPRQWQQNLFNFLQIHRYNGYQLLINERIRSPQHLSEQVKQALVFLSDRAPAEAYSEFRFELQNLGFEPGWGNTVARVRDTLEILDQLLDSPDHQVLEAFVSRIPMLFRIALISPHGWFGQEGVLGRPDTGGQVVYILDQVKSLEKQMREDLELAGLGVLEARPKIIVLTRLIPNAEGTLCNQRLEKIYGTNDAWILRVPFREFNPKVTQNWISRFEIWPYLETFAIDAERELRAEFGHVPDLIIGNYSDGNLVAFLLARRLKVTQCNIAHALEKSKYLFSNLYWQDLEDKYHFSLQFTADLIAMNAANFIISSTYQEIVGTPDSIGQYESYQSFTMPDLYHVVNGIELFSPKFNVVPPGVNEQVYFPYYHYTERLEGDRQRLEELLFTLEDPQQIYGYLEAPEKRPLFSMARLDRIKNLTGLAEAFGRSKALQERCNLILVAGKLRTADSSDREEIAEIEKLYQIIHQYNLHGKIRWLGIRLPKADSGEIYRIIADRQGIFVQPALFEAFGLTILEAMISGLPTFGTRFGGPLEIIQDGVNGFYINPTHLEEMAETIVRFLEACDRDPQEWQRISKAGIERVYSTYTWKIHCTRLLSLAKIYGFWNFSSQENREDMMRYMEALFHLLYKPRAQALLAEHLQR

SEQ ID NO: 404 - protein, 808 aa, synthetic construct
MTAVLLESVVESDERADLRQFSRILQLGEKGYLLRNDILDAFADYCRAQDRPVPPPDESGLSKLVFYTQEIIVDNESLCWIVRPRIAQQEVCRLLVEDLTIVPMTIPELLDLRDRLVNHYHPNEGDVFEIDVQPFYDYSPIIRDAKNIGKGVEFLNRYLSSKLFQDPRQWQQNLFNFLQIHRYNGYQLLINERIRSPQHLSEQVKQALVVLSDRPPAEAYSEFRFELQNLGFEPGWGNTVARVRDTLEILDQLLDSPDHQVLEAFVSRIPMLFRIALISPHGWFGQEGVLGRPDTGGQVVYILDQVKSLEKQMREDLELAGLGVLEARPKIIVLTRLIPNAEGTLCNQRLEKIYGTNNAWILRVPFREFNPKVTQNWISRFEIWPYLETFAIDAERELRAEFGHVPDLIIGNYSDGNLVAFLLARRLKVTQCNIAHALEKSKYLFSNLYWQDLEDKYHFSLQFTADLIAMNAANFIISSTYQEIVGTPDSIGQYESYQSFTMPDLYHVVNGIELFSPKFNVVPPGVNEQVYFPYYHYTERLEGDRQRLEELLFTLEDPQQIYGYLEAPEKRPLFSMARLDRIKNLTGLAEAFGRSKALQERCNLILVAGKLRTADSSDREEIAEIEKLYQIIHQYNLHGKIRWLGIRLPKADSGEIYRIIADRQGIFVQPALFEAFGLTILEAMISGLPTFGTRFGGPLEIIQDGVNGFYINPTHLEEMAETIVRFLEACDRDPQEWQRISKAGIERVYSTYTWKIHCTRLLSLAKIYGFWNFSSQENREDMMRYMEALFHLLYKPRAQALLAEHLQR

SEQ ID NO: 405 - protein, 808 aa, synthetic construct
MTSVLLESVIESDERADLRQFSRILQLGEKGYLLRNDILQAFADYCRNQDRPVPPPDESRLSKLVFYTQEIIVDNESLCWIIRPRIAQQEVCRLLVEDLTIVPMTIPELLDLRDRLVNHYHPNEGDVFEIDVQPFYDYSPIIRDAKNIGKGVEFLNRYLSSKLFQDPRQWQQNLFNFLQIHRYNGYQLLINERIRSPQHLSEQVKQALVALSDRAPAEAYSEFRFELQNLGFEPGWGNTVARVRDTLEILDQLLDSPDHQVLEAFVSRIPMLFRIALISPHGWFGQEGVLGRPDTGGQVVYILDQVKSLEKQMREDLELAGLGVLEARPKIIVLTRLIPNAEGTLCNQRLEKIYGTNDAWILRVPFREFNPKVTQNWISRFEIWPYLETFAIDAERELRAEFGHVPDLIIGNYSDGNLVAFLLARRLKVTQCNIAHALEKSKYLFSNLYWQDLEDKYHFSLQFTADLIAMNAANFIISSTYQEIVGTPDSIGQYESYQSFTMPDLYHVVNGIELFSPKFNVVPPGVNEQVYFPYYHYTERLEGDRQRLEELLFTLEDPQQIYGYLEAPEKRPLFSMARLDRIKNLTGLAEAFGRSKALQERCNLILVAGKLRTADSSDREEIAEIEKLYQIIHQYNLHGKIRWLGIRLPKADSGEIYRIIADRQGIFVQPALFEAFGLTILEAMISGLPTFGTRFGGPLEIIQDGVNGFYINPTHLEEMAETIVRFLEACDRDPQEWQRISKAGIERVYSTYTWKIHCTRLLSLAKIYGFWNFSSQENREDMMRYMEALFHLLYKPRAQALLAEHLQR

SEQ ID NO: 406 - protein, 808 aa, synthetic construct
MTCDLLESVVNSDERADLRQFSRILQLGEKRYLLRNDILDAFADYCRAQQRPVPTPDESRLSKLVFYTQEIIVDNESLCWIVRPQIAQQEVCRLLVEDLTIVPITIPELLDLRDRLVNHYHPNEGDVFEIDVRPFYDYSPIIRDAKNIGKGVEFLNRYLSSKLFQDPRQWQQNLFNFLQIHRYNGYQLLINERIRSPQHLSEQVKQALVALSDRAPAEAYSEFRFELQNLGFEPGWGNTVARVRDTLEILDQLLDSPDHQVLEAFVSRIPMLFRIALISPHGWFGQEGVLGRPDTGGQVVYILDQVKSLEKQMREDLELAGLGVLEARPKIIVLTRLIPNAEGTLCNQRLEKIYGTNDAWILRVPFREFNPKVTQNWISRFEIWPYLETFAIDAERELLAEFGHVPDLIIGNYSDGNLVAFLLARRLKVTQCNIAHALEKSKYLFSNLYWQDLEDKYHFSLQFTADLIAMNAANFIISSTYQEIVGTPDSIGQYESYQSFTMPDLYHVVNGIELFSPKFNVVPPGVNEQVYFPYYHYTERLEGDRQRLEELLFTLEDPQQIYGYLEAPEKRPLFSMARLDRIKNLTGLAEAFGRSKALQERCNLILVAGKLRTADSSDREEIAEIEKLYQIIHQYNLHGKIRWLGIRLPKADSGEIYRIIADRQGIFVQPALFEAFGLTILEAMISGLPTFGTRFGGPLEIIQDGVNGFYINPTHLEEMAETIVRFLEACDRDPQEWQRISKAGIERVYSTYTWKIHCTRLLSLAKIYGFWNFSSQENREDMMRYMEALFHLLYKPRAQALLAEHLQR

SEQ ID NO: 407 - protein, 808 aa, synthetic construct
MTSVLLKSVIESDERADLRQFSRLLQLGEKRYLLRNDILQAFADYCRALQRPVPTPSESRLSKLVFYTQEIIVDNESLCWIIRPRIAQQEVCRLLVEDLTIVPMTIPELLDLRDRLVNHYHPNEGDVFEIDVQPFYDYSPIIRDAKNIGKGVEFLNRFLSSKLFQDPRQWQQNLFNFLQIHRYNGYQLLINERIRSPQHLSEQVKQALVALSDRAPAEAYSEFRFELQNLGFEPGWGNTAARVRDTLEILDQLLDSPDHQVLEAFVSRIPMLFRIALISPHGWFGQEGVLGRPDTGGQVVYILDQVKSLEKQMREDLELAGLGVLEARPKIIVLTRLIPNAEGTLCNQRLEKIYGTNDAWILRVPFREFNPKVTQNWISRFEIWPYLETFAIDAERELRAEFGHVPDLIIGNYSDGNLVAFLLSRRMKVTQCNIAHALEKSKYLFSNLYWQDLEDKYHFSLQFTADLIAMNAANFIISSTYQEIVGTPDSIGQYESYQSFTMPDLYHVVNGIELFSPKFNVVPPGVNEQVYFPYYHYTERLEGDRQRLEELLFTLEDPQQIYGYLEAPEKRPLFSMARLDRIKNLTGLAEAFGRSKALQERCNLILVAGKLRTADSSDREEIAEIEKLYQIIHQYNLHGKIRWLGIRLPKADSGEIYRIIADRQGIFVQPALFEAFGLTILEAMISGLPTFGTRFGGPLEIIQDGVNGFYINPTHLEEMAETIVRFLEACDRDPQEWQRISKAGIERVYSTYTWKIHCTRLLSLAKIYGFWNFSSQENREDMMRYMEALFHLLYKPRAQALLAEHLQR

SEQ ID NO: 408 - protein, 808 aa, synthetic construct
MTAVLLESVVNSDERADLRQFSRILQLGEKGYLLRNDILDAFADYCRNQDKPVPPPSESRLSKLVFYTQEIIVDNESLCWIVRPRIAQQEVCRLLVEDLTIVPMTIPELLDLRDRLVNHYHPNEGDVFEIDVQPFYDYSPIIRDAKNIGKGVEFLNRFMSSKLFQDPRQWQQNLFNFLQIHRYNGYQLLINERIRSPQHLSEQVKQALVFLSDRAPAEAYSEFRFELQNLGFEPGWGNTVARVRDTLEILDQLLDSPDHQVLEAFVSRIPMLFRIALISPHGWFGQEGVLGRPDTGGQVVYILDQVKSLEKQMREDLELAGLEVLEARPKIIVLTRLIPNAEGTLCNQRLEKIYGTNDAWILRVPFREFNPKVTQNWISRFEIWPYLETFALDAERELRAEFGHVPDLIIGNYSDGNLVAFLLARRLKVTQCNIAHALEKSKYLFSNLYWQDLEDKYHFSLQFTADLIAMNAANFIISSTYQEIVGTPDSIGQYESYQSFTMPDLYHVVNGIELFSPKFNVVPPGVNEQVYFPYYHYTERLEGDRQRLEELLFTLEDPQQIYGYLEAPEKRPLFSMARLDRIKNLTGLAEAFGRSKALQERCNLILVAGKLRTADSSDREEIAEIEKLYQIIHQYNLHGKIRWLGIRLPKADSGEIYRIIADRQGIFVQPALFEAFGLTILEAMISGLPTFGTRFGGPLEIIQDGVNGFYINPTHLEEMAETIVRFLEACDRDPQEWQRISKAGIERVYSTYTWKIHCTRLLSLAKIYGFWNFSSQENREDMMRYMEALFHLLYKPRAQALLAEHLQR

SEQ ID NO: 409 - protein, 808 aa, synthetic construct
MTCELLESVVNSDERADLRQFSRILQLGEKGYLLRNDILQAFADYCRNQQRPVPPPDESRLSKLVFYTQEIIVDNESLCWIIRPQIAQQEVCRLLVEDLTIVPMTIPELLDLRDRLVNHYHPNEGDVFEIDVQPFYDYSPIIRDAKNIGKGVEFLNRYMSSKLFQDPRQWQQNLFQFLQIHRYNGYQLLINERIRSPQHLSEQVKQALVVLSDRAPAEAYSEFRFELQNLGFEPGWGNTVARVRDTLEILDQLLDSPDHQVLEAFVSRIPMLFRIALISPHGWFGQEGVLGRPDTGGQVVYILDQVKSLEKQMREDLELAGLGVLEARPKIIVLTRLIPNAEGTLCNQRLEKIYGTNDAWILRVPFREFNPKVTQNWISRFEIWPYLETFTIDAERELLAEFGHVPDLIIGNYSDGNLVAFLLARRLKVTQCNIAHALEKSKYLFSNLYWQDLEDKYHFSLQFTADLIAMNAANFIISSTYQEIVGTPDSIGQYESYQSFTMPDLYHVVNGIELFSPKFNVVPPGVNEQVYFPYYHYTERLEGDRQRLEELLFTLEDPQQIYGYLEAPEKRPLFSMARLDRIKNLTGLAEAFGRSKALQERCNLILVAGKLRTADSSDREEIAEIEKLYQIIHQYNLHGKIRWLGIRLPKADSGEIYRIIADRQGIFVQPALFEAFGLTILEAMISGLPTFGTRFGGPLEIIQDGVNGFYINPTHLEEMAETIVRFLEACDRDPQEWQRISKAGIERVYSTYTWKIHCTRLLSLAKIYGFWNFSSQENREDMMRYMEALFHLLYKPRAQALLAEHLQR

SEQ ID NO: 410 - protein, 808 aa, synthetic construct
MTSVLLESVINSDERADLRQFSRILQLGEKGYLLRNDILQAFADYCRNQDRPVPTPDESRLSKLVFYTQEIIVDNESLCWIIRPRIAQQEVCRLLVEDLTIVPITIPELLDLRDRLVNHYHPNEGDVFEIDVQPFYDYSPIIRDAKNIGKGVEFLNRYLSSKLFQDPRQWQQNLFNFLQIHRYNGYQLLINERIRSPQHLSEQVKQALVALSDRAPAEAYSEFRFELQNLGFEPGWGNTVARVRDTLEILDQLLDSPDHQVLEAFVSRIPMLFRIALISPHGWFGQEGVLGRPDTGGQVVYILDQVKSLEKQMREDLELAGLGVLEARPKIIVLTRLIPNAEGTLCNQRLEKIYGTNDAWILRVPFREFNPKVTQNWISRFEIWPYLETFAIDAERELRAEFGHVPDLIIGNYSDGNLVAFLLSRRLKVTQCNIAHALEKSKYLFSNLYWQDLEDKYHFSMQFTADLIAMNAANFIISSTYQEIVGTPDSIGQYESYQSFTMPDLYHVVNGIELFSPKFNVVPPGVNEQVYFPYYHYTERLEGDRQRLEELLFTLEDPQQIYGYLEAPEKRPLFSMARLDRIKNLTGLAEAFGRSKALQERCNLILVAGKLRTADSSDREEIAEIEKLYQIIHQYNLHGKIRWLGIRLPKADSGEIYRIIADRQGIFVQPALFEAFGLTILEAMISGLPTFGTRFGGPLEIIQDGVNGFYINPTHLEEMAETIVRFLEACDRDPQEWQRISKAGIERVYSTYTWKIHCTRLLSLAKIYGFWNFSSQENREDMMRYMEALFHLLYKPRAQALLAEHLQR

SEQ ID NO: 411 - protein, 808 aa, synthetic construct
MTSVLLKSVVESDERADLRQFSRQLQLGEKRYLLRNDILGAFADYCRALDRPVPTPSESGLSKLVFYTQEIIVDNESLCWIIRPRIAQQEVCRLLVEDLTIVPMTIPELLDLRDRLVNRYHPNEGDVFEIDVQPFYDYSPIIRDAKNIGKGVEFLNRYLSSKLFQDPRQWQQNLFNFLQIHRYNGYQLLINERIRSPQHLSEQVKQALVALSDRASDEAYSEFRFELQNLGFEPGWGNTAARVRDTLEILDQLLDSPDHQVLEAFVSRIPMLFRIALVSPHGWFGQEGVLGRPDTGGQVVYILDQVKNLEKQMREDLELAGLGVLEARPKIIVLTRLIPNAEGTLCNQRLEKIYGTNNAWILRVPFREFNPKVTQNWISRFEIWPYLETFAIDAERELLAEFGHVPDLIIGNYSDGNLVAFLLARRMKVTQCNIAHALEKSKYLFSNLYWQDLEDKYHFSMQFTADLIAMNAANFIISSTYQEIVGTPDSIGQYESYQSFTMPDLYHVVNGIELFSPKFNVVPPGVNEQVYFPYYHYTERLEGDRQRLEELLFTLEDPQQIYGYLEAPEKRPLFSMARLDRIKNLTGLAEAFGRSKALQERCNLILVAGKLRTADSSDREEIAEIEKLYQIIHQYNLHGKIRWLGIRLPKADSGEIYRIIADRQGIFVQPALFEAFGLTILEAMISGLPTFGTRFGGPLEIIQDGVNGFYINPTHLEEMAETIVRFLEACDRDPQEWQRISKAGIERVYSTYTWKIHCTRLLSLAKIYGFWNFSSQENREDMMRYMEALFHLLYKPRAQALLAEHLQR

SEQ ID NO: 412 - protein, 808 aa, synthetic construct
MTSELLESVLNSDEKADLRQFSRILQLGEKGYLLRNDILQAFADYCRNQQKPVPFPDESGLSKLVFYTQEIIVDNESLCWIVRPRIAQQEVCRLLVEDLTIVPMTIPELLDLRDRLVNHYHPNEGDVFEIDVQPFYDYSPIIRDAKNIGKGVEFLNRYLSSKLFQDPRQWQQNLFQFLQIHQYNGYQLLINERIRSPQHLSEQVKQALVYLSDQPPAEAYSEFRFELQNLGFEPGWGNTVARVRDTLEILDQLLDSPDHQVLEAFVSRIPMLFRIALISPHGWFGQEGVLGRPDTGGQVVYILDQVKSLEKQMREDLELAGLGVLEARPKIIVLTRLIPNAEGTLCNQRLEKIYGTNDAWILRVPFREFNPKVTQNWISRFEIWPYLETFAIDAERELLAEFQHVPDLIIGNYSDGNLVAFLLARRLKVTQCNIAHALEKSKYLFSNLYWQDLEDKYHFSLQFTADLIAMNAANFIISSTYQEIVGTPDSIGQYESYQSFTMPDLYHVVNGIELFSPKFNVVPPGVNEQVYFPYYHYTERLEGDRQRLEELLFTLEDPQQIYGYLEAPEKRPLFSMARLDRIKNLTGLAEAFGRSKALQERCNLILVAGKLRTADSSDREEIAEIEKLYQIIHQYNLHGKIRWLGIRLPKADSGEIYRIIADRQGIFVQPALFEAFGLTILEAMISGLPTFGTRFGGPLEIIQDGVNGFYINPTHLEEMAETIVRFLEACDRDPQEWQRISKAGIERVYSTYTWKIHCTRLLSLAKIYGFWNFSSQENREDMMRYMEALFHLLYKPRAQALLAEHLQR

SEQ ID NO: 413 - protein, 808 aa, synthetic construct
MTADLLKSVLNSDERADLRQFSRILQLGEKGYLLRNEILDAFADYCRNQQRPVPTPDESGLSKLVFYTQEIIVDNESLCWIIRPQIAQQEVCRLLVEDLTIVPITIPELLDLRDRLVNHYHPNEGDVFEIDVQPFYDYSPIIRDAKNIGKGVEFLNRYLSSKLFQDPRQWQQNLFNFLQIHQYNGYQLLINERIRSPQHLSEQVKQALVFLSDRAPAEAYSEFRFELQNLGFEPGWGNTVARVRDTLEILDQLLDSPDHQVLEAFVSRIPMLFRIALISPHGWFGQEGVLGRPDTGGQVVYILDQVKSLEKQMREDIELAGLEVLEARPKIIVLTRLIPNAEGTLCNQRLEKIYGTNDAWILRVPFREFNPKVTQNWISRFEIWPYLETFAIDAERELRAEFGHVPDLIIGNYSDGNLVAFLLARRLKVTQCNIAHALEKSKYLFSNLYWQDLEDKYHFSLQFTADLITMNAANFIISSTYQEIVGTPDSIGQYESYQSFTMPDLYHVVNGIELFSPKFNVVPPGVNEQVYFPYYHYTERLEGDRQRLEELLFTLEDPQQIYGYLEAPEKRPLFSMARLDRIKNLTGLAEAFGRSKALQERCNLILVAGKLRTADSSDREEIAEIEKLYQIIHQYNLHGKIRWLGIRLPKADSGEIYRIIADRQGIFVQPALFEAFGLTILEAMISGLPTFGTRFGGPLEIIQDGVNGFYINPTHLEEMAETIVRFLEACDRDPQEWQRISKAGIERVYSTYTWKIHCTRLLSLAKIYGFWNFSSQENREDMMRYMEALFHLLYKPRAQALLAEHLQR

SEQ ID NO: 414 - protein, 808 aa, synthetic construct
MTSELLESVIESDERADLRQFSRILQLGEKRYLLRNDILGAFADYCRAKDRPVPFPLESGLSKLVFYTQEIIVDNESLCWIVRPRIAQQEVCRLLVEDLTIVPMTIPELLDLRDRLVNHYHPNEGDVFEIDVEPFYDYSPIIRDAKNIGKGVEFLNRYLSSKLFQDPRQWQQNLFNFLQIHRYNGYQLLINERIRSPPHLSEQVKQALVALSDRAPAEAYSEFRFELQNLGFEPGWGNTAARVRDTLEILDQLLDSPDHQVLEAFVSRIPMIFRIALISPHGWFGQEGVLGRPDTGGQVVYILDQVQSLEKQMREDLELAGLGVLEARPKIIVLTRLIPNAEGTLCNQRLEKIYGTNNAWILRVPFREFNPKVTQNWISRFEIWPYLETFAIDAERELLAEFGHVPDLIIGNYSDGNLVAFLLARRLKVTQCNIAHALEKSKYLFSNLYWQDLEDKYHFSLQFTADLIAMNAANFIISSTYQEIVGTPDSIGQYESYQSFTMPDLYHVVNGIELFSPKFNVVPPGVNEQVYFPYYHYTERLEGDRQRLEELLFTLEDPQQIYGYLEAPEKRPLFSMARLDRIKNLTGLAEAFGRSKALQERCNLILVAGKLRTADSSDREEIAEIEKLYQIIHQYNLHGKIRWLGIRLPKADSGEIYRIIADRQGIFVQPALFEAFGLTILEAMISGLPTFGTRFGGPLEIIQDGVNGFYINPTHLEEMAETIVRFLEACDRDPQEWQRISKAGIERVYSTYTWKIHCTRLLSLAKIYGFWNFSSQENREDMMRYMEALFHLLYKPRAQALLAEHLQR

SEQ ID NO: 415 - protein, 808 aa, synthetic construct
MTSVLLESVIESDERADLRQFSRILQLNEKGYLLRNDILQAFADYCRNQQRPVPPPDESGLSKLVFYTQEIIVDNESLCWIIRPKIAQQEVCRLLVEDLTIVPMTIQELLDLRDRLVNHYHPNEGDVFEIDVRPFYDYSPVIRDAKNIGKGVEFLNRYMSSKLFQDPRQWQQNLFNFLQIHRYNGYQLLINERIRSPQHLSEQVKQALVVLSDRAPAEAYSEFRFELQNLGFEPGWGNTVARVRDTLEILDQLLDSPDHQVLEAFVSRIPMLFRIALISPHGWFGQEGVLGRPDTGGQVVYILDQVKSLEKQMREDLELAGLGVLEARPKIIVLTRLIPNAEGTLCNQRLEKIYGTNDAWILRVPFREFNPKVTQNWISRFEIWPYLETFAIDAERELLAEFGHVPDLIIGNYSDGNLVAFLLSRRLKVTQCNIAHALEKSKYLFSNLYWQDLEDKYHFSLQFTADLIAMNAANFIISSTYQEIVGTPDSIGQYESYQSFTMPDLYHVVNGIELFSPKFNVVPPGVNEQVYFPYYHYTERLEGDRQRLEELLFTLEDPQQIYGYLEAPEKRPLFSMARLDRIKNLTGLAEAFGRSKALQERCNLILVAGKLRTADSSDREEIAEIEKLYQIIHQYNLHGKIRWLGIRLPKADSGEIYRIIADRQGIFVQPALFEAFGLTILEAMISGLPTFGTRFGGPLEIIQDGVNGFYINPTHLEEMAETIVRFLEACDRDPQEWQRISKAGIERVYSTYTWKIHCTRLLSLAKIYGFWNFSSQENREDMMRYMEALFHLLYKPRAQALLAEHLQR

SEQ ID NO: 416 - protein, 808 aa, synthetic construct
MTCVLLKAVVESDERADLRQFSRILQLGEKRYLLRNDILDAFADYCRDQERPVPPPSESRLSKLVFYTQEIIVDNESLCWIVRPRIAQQEVCRLLVEDLTIVPMTIPELLDLRDRLVNHYHPNEGDVFEIDVQPFYDYSPIIRDAKNIGKGVEFLNRYLSSKLFQDPRQWQQNLFNFLRIHRYNGYQLLINERIRSPQHLSEQVKQALVVLSDRPPTEAYSEFRFELQNLGFEPGWGNTVARVRDTLEILDQLLDSPDHQVLEAFVSRIPMLFRIALISPHGWFGQEGVLGRPDTGGQVVYILDQVKSLEKQMREDLELAGLGVLEAQPKIIVLTRLIPNAEGTLCNQRLEKIYGTNDAWILRVPFREFNPKVTQNWISRFEIWPYLETFAIDAERELRAEFGHVPDLIIGNYSDGNLVAFLLARRLKVTQCNIAHALEKSKYLFSNLYWQDLEDKYHFSLQFTADLIAMNAANFIISSTYQEIVGTPDSIGQYESYQSFTMPDLYHVVNGIELFSPKFNVVPPGVNEQVYFPYYHYTERLEGDRQRLEELLFTLEDPEQIYGKLDAPSKRPLFSMARLDRIKNLTGLAECFGRSKALQERCNLILVAGKLRTEDSSDREEIAEIEKLYQIIHEYNLHGKIRWLGIRLPKADSGEIYRIIADRQGIFVQPALFEAFGLTILEAMISGLPTFGTRFGGPLEIIQDGVNGFYINPTHLEEMAETIVRFIEACDRDPQEWQRISKAGIERVYSTYTWKIHTSRLLSLAKIYGFWNFSSQENREDMMRYMEALFHLLYKPRAQALLAEHLQR

SEQ ID NO: 417 - protein, 808 aa, synthetic construct
MTCVLLKAVVESDERADLRQFSRILQLGEKRYLLRNDILDAFADYCRDQERPVPPPSESRLSKLVFYTQEIIVDNESLCWIVRPRIAQQEVCRLLVEDLTIVPMTIPELLDLRDRLVNHYHPNEGDVFEIDVQPFYDYSPIIRDAKNIGKGVEFLNRYLSSKLFQDPRQWQQNLFNFLRIHRYNGYQLLINERIRSPQHLSEQVKQALVVLSDRPPTEAYSEFRFELQNLGFEPGWGNTVARVRDTLEILDQLLDSPDHQVLEAFVSRIPMLFRIALISPHGWFGQEGVLGRPDTGGQVVYILDQVKSLEKQMREDLELAGLGVLEAQPKIIVLTRLIPNAEGTLCNQRLEKIYGTNDAWILRVPFREFNPKVTQNWISRFEIWPYLETFAIDAERELRAEFGHVPDLIIGNYSDGNLVAFLLARRLKVTQCNIAHALEKSKYLFSNLYWQDLEDKYHFSLQFTADLIAMNAANFIISSTYQEIVGTPDSIGQYESYQSFTMPDLYHVVNGIELFSPKFNVVPPGVNEQVYFPYYHYTERLEGDRQRLEELLFTLEDPQQIYGYLEAPNKRPLFSMARLDRIKNLTGLAEAFGRSKALQERCNLILVAGKLRTEDSSDREERAEIEKLYQIIHEYNLHGKIRWLGIRLPKNDSGEIYRIIADRQGIFVQPALFEAFGLTILEAMISGLPTFGTRFGGPLEIIQDGVNGFYINPTHLEEMAETIVRFIEACDRDPQEWYRISQRGIQRVYSTYTWKIHCSRLLSLARIYGFWNFISQENREDMMRYMEALFHLLYKPRAQQLLAEHLQR

SEQ ID NO: 418 - protein, 808 aa, synthetic construct
MTCVLLKAVVESDERADLRQFSRILQLGEKRYLLRNDILDAFADYCRDQERPVPPPSESRLSKLVFYTQEIIVDNESLCWIVRPRIAQQEVCRLLVEDLTIVPMTIPELLDLRDRLVNHYHPNEGDVFEIDVQPFYDYSPIIRDAKNIGKGVEFLNRYLSSKLFQDPRQWQQNLFNFLRIHRYNGYQLLINERIRSPQHLSEQVKQALVVLSDRPPTEAYSEFRFELQNLGFEPGWGNTVARVRDTLEILDQLLDSPDHQVLEAFVSRIPMLFRIALISPHGWFGQEGVLGRPDTGGQVVYILDQVKSLEKQMREDLELAGLGVLEAQPKIIVLTRLIPNAEGTLCNQRLEKIYGTNDAWILRVPFREFNPKVTQNWISRFEIWPYLETFAIDAERELRAEFGHVPDLIIGNYSDGNLVAFLLARRLKVTQCNIAHALEKSKYLFSNLYWQDLEDKYHFSLQFTADLIAMNAANFIISSTYQEIVGTPDSIGQYESYQSFTMPDLYHVVNGIELFSPKFNVVPPGVNEQVYFPYYHYTERLEGDRQRLEELLFTLEDPSQIYGHLEDPQKRPLFSMARLDRIKNLTGLAEAFGRSKALQERCNLILVAGKLRTEDSSDREEIAEIEKLYQIIHEYNLHGKIRWLGIRLPKADSGEIYRIIADHQGIFVQPALFEAFGLTILEAMITGLPTFGTRFGGPLEIIQDGVNGFYINPTHLEEMAETIVRFIEACDRDPQEWQRISKASIERVYSTYTWKIHCTRLLSLARIYGFWNFSSQENREDMMRYMEALFHLLYKPRAQKLLAEHLQR

SEQ ID NO: 419 - protein, 808 aa, synthetic construct
MTCVLLKAVVESDERADLRQFSRILQLGEKRYLLRNDILDAFADYCRDQERPVPPPSESRLSKLVFYTQEIIVDNESLCWIVRPRIAQQEVCRLLVEDLTIVPMTIPELLDLRDRLVNHYHPNEGDVFEIDVQPFYDYSPIIRDAKNIGKGVEFLNRYLSSKLFQDPRQWQQNLFNFLRIHRYNGYQLLINERIRSPQHLSEQVKQALVVLSDRPPTEAYSEFRFELQNLGFEPGWGNTVARVRDTLEILDQLLDSPDHQVLEAFVSRIPMLFRIALISPHGWFGQEGVLGRPDTGGQVVYILDQVKSLEKQMREDLELAGLGVLEAQPKIIVLTRLIPNAEGTLCNQRLEKIYGTNDAWILRVPFREFNPKVTQNWISRFEIWPYLETFAIDAERELRAEFGHVPDLIIGNYSDGNLVAFLLARRLKVTQCNIAHALEKSKYLFSNLYWQDLEDKYHFSLQFTADLIAMNAANFIISSTYQEIVGTPDSIGQYESYQSFTMPDLYHVVNGIELFSPKFNVVPPGVNEQVYFPYYHQTDRLEGDRQRLEELLFTLEDPEQIYGKLEAPNKRPLFSMARLDRIKNLTGLAEAFGRSKALQERCNLILVAGKLRTEDSSDREEIDEIEKLYQIIHQYNLHGKIRWLGIRLPKGDSGEIYRVIADRQGIFVQPALFEAFGLTILEAMISGLPTFGTRFGGPLEIIQDQVNGFYINPTHLEEMAETIVRFIEACDRDPQEWQRISKAGIERVYSTYTWKIHTSRLLSLAKIYGFWNFSSQENREDMMRYMEALFHLLYKPRAQRLLAEHLQR

SEQ ID NO: 420 - protein, 808 aa, synthetic construct
MTCVLLKAVVESDERADLRQFSRILQLGEKRYLLRNDILDAFADYCRDQERPVPPPSESRLSKLVFYTQEIIVDNESLCWIVRPRIAQQEVCRLLVEDLTIVPMTIPELLDLRDRLVNHYHPNEGDVFEIDVQPFYDYSPIIRDAKNIGKGVEFLNRYLSSKLFQDPRQWQQNLFNFLRIHRYNGYQLLINERIRSPQHLSEQVKQALVVLSDRPPTEAYSEFRFELQNLGFEPGWGNTVARVRDTLEILDQLLDSPDHQVLEAFVSRIPMLFRIALISPHGWFGQEGVLGRPDTGGQVVYILDQVKSLEKQMREDLELAGLGVLEAQPKIIVLTRLIPNAEGTLCNQRLEKIYGTNDAWILRVPFREFNPKVTQNWISRFEIWPYLETFAIDAERELRAEFGHVPDLIIGNYSDGNLVAFLLARRLKVTQCNIAHALEKSKYLFSNLYWQDLEDKYHFSLQFTADLIAMNAANFIISSTYQEIVGTPDSIGQYESYQSFTMPDLYHVVNGIELFSPKFNVVPPGVNEQVYFPYTHYTERLEGDRQRLEELLFTLEDPQQIFGKLEAPNKRPLFSMARLDRIKNLTGLAECFGRSKALQEQCNLILVAGKLRTADSSDREEIAEIEKLYQIIHEYNLHGKIRWLGIRLPKADSGEIYRIIADRQGIFVQPALFEAFGLTILEAMISGLPTFGTRFGGPLEIIQDGKNGFYINPTHLEEMAETIVRFIEACNRDPQYWQRISQAGIERVYSTYTWKIHCSRLLSLAKIYGFWNFSSQENREDMMRYMEALFHLLYKPRAQALLAEHLQR

SEQ ID NO: 421 - protein, 808 aa, synthetic construct
MTCVLLKAVVESDERADLRQFSRILQLGEKRYLLRNDILDAFADYCRDQERPVPPPSESRLSKLVFYTQEIIVDNESLCWIVRPRIAQQEVCRLLVEDLTIVPMTIPELLDLRDRLVNHYHPNEGDVFEIDVQPFYDYSPIIRDAKNIGKGVEFLNRYLSSKLFQDPRQWQQNLFNFLRIHRYNGYQLLINERIRSPQHLSEQVKQALVVLSDRPPTEAYSEFRFELQNLGFEPGWGNTVARVRDTLEILDQLLDSPDHQVLEAFVSRIPMLFRIALISPHGWFGQEGVLGRPDTGGQVVYILDQVKSLEKQMREDLELAGLGVLEAQPKIIVLTRLIPNAEGTLCNQRLEKIYGTNDAWILRVPFREFNPKVTQNWISRFEIWPYLETFAIDAERELRAEFGHVPDLIIGNYSDGNLVAFLLARRLKVTQCNIAHALEKSKYLFSNLYWQDLEDKYHFSLQFTADLIAMNAANFIISSTYQEIVGTPDSIGQYESYQSFTMPDLYHVVNGIELFSPKFNVVPPGVNEQVYFPYYHYTERLEGDRQRLEELLFTLEDPSQIYGYLDYPDKRPLFSMARLDRIKNLTGLAEAFGRSKALQERCNLILVAGKLRTEDSSDREEIAEIEKLYQIIHEYQLHGKIRWLGIRLPKADSGEIYRIIADRQGVFVQPALFEAFGLTILEAMISGLPTFGTRFGGPLEIIQDGVNGFYINPTHLEEMAETIVRFIEACDRDPQQWYRISQAGIQRVYSTYTWKIHCTRLLSLAKIYGFWNFSSQENREDMMRYMEALFHLLYKPRAQRLLAEHLQR

SEQ ID NO: 422 - protein, 808 aa, synthetic construct
MTCVLLKAVVESDERADLRQFSRILQLGEKRYLLRNDILDAFADYCRDQERPVPPPSESRLSKLVFYTQEIIVDNESLCWIVRPRIAQQEVCRLLVEDLTIVPMTIPELLDLRDRLVNHYHPNEGDVFEIDVQPFYDYSPIIRDAKNIGKGVEFLNRYLSSKLFQDPRQWQQNLFNFLRIHRYNGYQLLINERIRSPQHLSEQVKQALVVLSDRPPTEAYSEFRFELQNLGFEPGWGNTVARVRDTLEILDQLLDSPDHQVLEAFVSRIPMLFRIALISPHGWFGQEGVLGRPDTGGQVVYILDQVKSLEKQMREDLELAGLGVLEAQPKIIVLTRLIPNAEGTLCNQRLEKIYGTNDAWILRVPFREFNPKVTQNWISRFEIWPYLETFAIDAERELRAEFGHVPDLIIGNYSDGNLVAFLLARRLKVTQCNIAHALEKSKYLFSNLYWQDLEDKYHFSLQFTADLIAMNAANFIISSTYQEIVGTPDSIGQYESYQSFTMPDLYHVVNGIELFSPKFNVVPPGVNEQVYFPYYHYTERLEGDRQRLEELLFTLEDPEQIYGKLDDPSKRPLFSMARLDRIKNLTGLAECFGRSKALQERCNLILVAGKLRTEDSSDREEIDEIEKLYQIIHEYNLHGKIRWLGIRLPKADSGEIYRIIADRQGIFVQPALFEAFGLTILEAMISGLPTFGTRFGGPLEIIQDGKNGFYINPTHLEEMAETIVRFIEACDRDPQEWERISKAGIERVYSTYTWKIHTSRLLSLAKIYGFWNFSSQENREDMMRYMEALFHLLYKPRAQRLLAEHLQR

SEQ ID NO: 423 - protein, 808 aa, synthetic construct
MTCVLLKAVVESDERADLRQFSRILQLGEKRYLLRNDILDAFADYCRDQERPVPPPSESRLSKLVFYTQEIIVDNESLCWIVRPRIAQQEVCRLLVEDLTIVPMTIPELLDLRDRLVNHYHPNEGDVFEIDVQPFYDYSPIIRDAKNIGKGVEFLNRYLSSKLFQDPRQWQQNLFNFLRIHRYNGYQLLINERIRSPQHLSEQVKQALVVLSDRPPTEAYSEFRFELQNLGFEPGWGNTVARVRDTLEILDQLLDSPDHQVLEAFVSRIPMLFRIALISPHGWFGQEGVLGRPDTGGQVVYILDQVKSLEKQMREDLELAGLGVLEAQPKIIVLTRLIPNAEGTLCNQRLEKIYGTNDAWILRVPFREFNPKVTQNWISRFEIWPYLETFAIDAERELRAEFGHVPDLIIGNYSDGNLVAFLLARRLKVTQCNIAHALEKSKYLFSNLYWQDLEDKYHFSLQFTADLIAMNAANFIISSTYQEIVGTPDSIGQYESYQSFTMPDLYHVVNGIELFSPKFNVVPPGVNEQVYFPYTHYTERLEGDRQRLEELLFTLEDPSQIFGHLEAPEKRPLFSMARLDRIKNLTGLAEAFGRSKALQERCNLILVAGKLRTEDSSDREERAEIEKLYQIIHEYNLHGKIRWLGIRLPKADSGEIYRVIADRQGIFVQPALFEAFGLTILEAMISGLPTFGTRFGGPLEIIQDQVNGFYINPTHLEETAETILRFIEACDRDPQQWQRISKAGIQRVYSTYTWKIHTSRLLSLARIYGFWNFISQENREDMMRYMEALFHLLYKPRAQQLLAEHLQR

SEQ ID NO: 424 - protein, 808 aa, synthetic construct
MTCVLLKAVVESDERADLRQFSRILQLGEKRYLLRNDILDAFADYCRDQERPVPPPSESRLSKLVFYTQEIIVDNESLCWIVRPRIAQQEVCRLLVEDLTIVPMTIPELLDLRDRLVNHYHPNEGDVFEIDVQPFYDYSPIIRDAKNIGKGVEFLNRYLSSKLFQDPRQWQQNLFNFLRIHRYNGYQLLINERIRSPQHLSEQVKQALVVLSDRPPTEAYSEFRFELQNLGFEPGWGNTVARVRDTLEILDQLLDSPDHQVLEAFVSRIPMLFRIALISPHGWFGQEGVLGRPDTGGQVVYILDQVKSLEKQMREDLELAGLGVLEAQPKIIVLTRLIPNAEGTLCNQRLEKIYGTNDAWILRVPFREFNPKVTQNWISRFEIWPYLETFAIDAERELRAEFGHVPDLIIGNYSDGNLVAFLLARRLKVTQCNIAHALEKSKYLFSNLYWQDLEDKYHFSLQFTADLIAMNAANFIISSTYQEIVGTPDSIGQYESYQSFTMPDLYHVVNGIELFSPKFNVVPPGVNEQVYFPYYHQTERLEGDRQRLEELLFTLEDPSQIYGYLQAPDKRPLFSMARLDRIKNLTGLAECFGRSKALQEQCNLILVAGKLRTEDSSDREEIAEIEKLYQIIHEYQLHGKIRWLGIRLPKADSGEIYRIIADHQGVFVQPALFEAFGLTILEAMISGLPTFGTRFGGPLEIIQDGVNGFYINPTHLEEMAETIVRFIEACDRDPEEWLRISQAGIERVYSTYTWKIHCSRLLSLAKIYGFWNFISQENREDMMRYMEALFHLLYKPRAQALLAEHLQR

SEQ ID NO: 425 - protein, 808 aa, synthetic construct
MTCVLLKAVVESDERADLRQFSRILQLGEKRYLLRNDILDAFADYCRDQERPVPPPSESRLSKLVFYTQEIIVDNESLCWIVRPRIAQQEVCRLLVEDLTIVPMTIPELLDLRDRLVNHYHPNEGDVFEIDVQPFYDYSPIIRDAKNIGKGVEFLNRYLSSKLFQDPRQWQQNLFNFLRIHRYNGYQLLINERIRSPQHLSEQVKQALVVLSDRPPTEAYSEFRFELQNLGFEPGWGNTVARVRDTLEILDQLLDSPDHQVLEAFVSRIPMLFRIALISPHGWFGQEGVLGRPDTGGQVVYILDQVKSLEKQMREDLELAGLGVLEAQPKIIVLTRLIPNAEGTLCNQRLEKIYGTNDAWILRVPFREFNPKVTQNWISRFEIWPYLETFAIDAERELRAEFGHVPDLIIGNYSDGNLVAFLLARRLKVTQCNIAHALEKSKYLFSNLYWQDLEDKYHFSLQFTADLIAMNAANFIISSTYQEIVGTPDSIGQYESYQSFTMPDLYHVVNGIELFSPKFNVVPPGVNEQVYFPYYHYEERVESDRQRLEELLFTLEDPEQIFGKLDAPNKRPLFSMARLDRIKNLTGLAECFGRSKALQERCNLILVAGKLRTEDSSDYEEIAEIEKLYQIIHQYNLHGKIRWLGIRLPKGDSGEIYRVIADRQGIFVQPALFEAFGLTILEAMISGLPTFATRFGGPLEIIQDQVNGFYINPTHLEEMAETIVRFIEQCDRDPQEWQRISKAGIERVYSTYTWKIHTSRLLSLAKIYGFWNFSSQENREDMMRYMEALFHLLYKPRAQALLAEHLQR

SEQ ID NO: 426 - protein, 808 aa, synthetic construct
MTCVLLKAVVESDERADLRQFSRILQLGEKRYLLRNDILDAFADYCRDQERPVPPPSESRLSKLVFYTQEIIVDNESLCWIVRPRIAQQEVCRLLVEDLTIVPMTIPELLDLRDRLVNHYHPNEGDVFEIDVQPFYDYSPIIRDAKNIGKGVEFLNRYLSSKLFQDPRQWQQNLFNFLRIHRYNGYQLLINERIRSPQHLSEQVKQALVVLSDRPPTEAYSEFRFELQNLGFEPGWGNTVARVRDTLEILDQLLDSPDHQVLEAFVSRIPMLFRIALISPHGWFGQEGVLGRPDTGGQVVYILDQVKSLEKQMREDLELAGLGVLEAQPKIIVLTRLIPNAEGTLCNQRLEKIYGTNDAWILRVPFREFNPKVTQNWISRFEIWPYLETFAIDAERELRAEFGHVPDLIIGNYSDGNLVAFLLARRLKVTQCNIAHALEKSKYLFSNLYWQDLEDKYHFSLQFTADLIAMNAANFIISSTYQEIVGTPDSIGQYESYQSFTMPDLYHVVNGIELFSPKFNVVPPGVNEQVYFPYTHTTNRLEGDRQRLEELLFTLEDPEQIYGKLEDLNKRPLFSMARLDRIKNLTGLAEAFGRSKALQERCNLILVAGKLRTEDSSDREEIDEIEKLYQIIHQYNLHGKIRWLGIRLPKNDSGEIYRVIADRQGIFVQPALFEAFGLTILEAMISGLPTFGTRFGGPLEIIQNQVNGFYINPTHLEEMAETIVRFIEACDRDPQEWQRLSQAGIERVYSTYTWKIHTSRLLSLAKIYGFWNFSSQENREDMMRYMEALFHLLYKPRAQALLAEHLQR

SEQ ID NO: 427 - protein, 808 aa, synthetic construct
MTCVLLKAVVESDERADLRQFSRILQLGEKRYLLRNDILDAFADYCRDQERPVPPPSESRLSKLVFYTQEIIVDNESLCWIVRPRIAQQEVCRLLVEDLTIVPMTIPELLDLRDRLVNHYHPNEGDVFEIDVQPFYDYSPIIRDAKNIGKGVEFLNRYLSSKLFQDPRQWQQNLFNFLRIHRYNGYQLLINERIRSPQHLSEQVKQALVVLSDRPPTEAYSEFRFELQNLGFEPGWGNTVARVRDTLEILDQLLDSPDHQVLEAFVSRIPMLFRIALISPHGWFGQEGVLGRPDTGGQVVYILDQVKSLEKQMREDLELAGLGVLEAQPKIIVLTRLIPNAEGTLCNQRLEKIYGTNDAWILRVPFREFNPKVTQNWISRFEIWPYLETFAIDAERELRAEFGHVPDLIIGNYSDGNLVAFLLARRLKVTQCNIAHALEKSKYLFSNLYWQDLEDKYHFSLQFTADLIAMNAANFIISSTYQEIVGTPDSIGQYESYQSFTMPDLYHVVNGIELFSPKFNVVPPGVNEQVYFPYYHYEERVESDRQRLEELLFTLEDPEQIFGKLDDPEKRPLFSMARLDRIKNLTGLAECFGRSPALQERCNLILVAGKLRTEDSSDYEEIDEIEKLYQIIHEYNLHGKIRWLGIRLPKGDSGEIYRVIADRQGIFVQPALFEAFGLTILEAMISGLPTFGTRFGGPLEIIQNQVNGFYINPTHLEEMAETIVRFIEQCDRDPQEWERISKASIERVYSTYTWKIHCSRLLSLAKIYGFWNFSSQENREDMMRYMEALFHLLYKPRAQRLLAEHLQR

SEQ ID NO: 428 - protein, 808 aa, synthetic construct
MTCVLLKAVVESDERADLRQFSRILQLGEKRYLLRNDILDAFADYCRDQERPVPPPSESRLSKLVFYTQEIIVDNESLCWIVRPRIAQQEVCRLLVEDLTIVPMTIPELLDLRDRLVNHYHPNEGDVFEIDVQPFYDYSPIIRDAKNIGKGVEFLNRYLSSKLFQDPRQWQQNLFNFLRIHRYNGYQLLINERIRSPQHLSEQVKQALVVLSDRPPTEAYSEFRFELQNLGFEPGWGNTVARVRDTLEILDQLLDSPDHQVLEAFVSRIPMLFRIALISPHGWFGQEGVLGRPDTGGQVVYILDQVKSLEKQMREDLELAGLGVLEAQPKIIVLTRLIPNAEGTLCNQRLEKIYGTNDAWILRVPFREFNPKVTQNWISRFEIWPYLETFAIDAERELRAEFGHVPDLIIGNYSDGNLVAFLLARRLKVTQCNIAHALEKSKYLFSNLYWQDLEDKYHFSLQFTADLIAMNAANFIISSTYQEIVGTPDSIGQYESYQSFTMPDLYHVVNGIELFSPKFNVVPPGVNEQVYFPYYHQTERLEGDRQRLEELLFTLEDPSQIFGYLDAPSKRPLFSMARLDRIKNLTGLAEAFGRSQALQERCNLILVAGKLRTEDSSDSEERAEIEKLYQIIHEYNLHGKIRWLGIRLPKNDSGEIYRIIADRQGVFVQPALFEAFGLTILEAMISGLPTFGTQFGGPLEIIQDGVNGFYINPTHLEEMAETIVRFLEACDHDPEEWYRISKAAIQRVYSTYTWKIHTSKLLSLARIYGFWNFISQENREDMMRYMEALFHLLYKPRAQQLLAEHLQR

SEQ ID NO: 429 - protein, 808 aa, synthetic construct
MTCVLLKAVVESDERADLRQFSRILQLGEKRYLLRNDILDAFADYCRDQERPVPPPSESRLSKLVFYTQEIIVDNESLCWIVRPRIAQQEVCRLLVEDLTIVPMTIPELLDLRDRLVNHYHPNEGDVFEIDVQPFYDYSPIIRDAKNIGKGVEFLNRYLSSKLFQDPRQWQQNLFNFLRIHRYNGYQLLINERIRSPQHLSEQVKQALVVLSDRPPTEAYSEFRFELQNLGFEPGWGNTVARVRDTLEILDQLLDSPDHQVLEAFVSRIPMLFRIALISPHGWFGQEGVLGRPDTGGQVVYILDQVKSLEKQMREDLELAGLGVLEAQPKIIVLTRLIPNAEGTLCNQRLEKIYGTNDAWILRVPFREFNPKVTQNWISRFEIWPYLETFAIDAERELRAEFGHVPDLIIGNYSDGNLVAFLLARRLKVTQCNIAHALEKSKYLFSNLYWQDLEDKYHFSLQFTADLIAMNAANFIISSTYQEIVGTPDSIGQYESYQSFTMPDLYHVVNGIELFSPKFNVVPPGVNEQVYFPYTHQQERVESDRQRLEELLFTLEDPEQIYGHLEDPNKRPLFSMARLDRIKNLTGLAEAFGRSQALQERCNLILVAGKLRTEDSSDREEIAEIEKLYQIIEEYNLHGKIRWLGIRLPKADSGEIYRIIADRQGIFVQPALFEAFGLTILEAMISGLPTFATRFGGPLEIIQDGKNGFYINPTHLEEMAETIVRFIEQCDRDPQYWERISKAGIQRVYSTYTWKIHTSRLLSLAKIYGFWNFSSQENREDMMRYMEALFHLLYKPRAQRLLAEHLQR

SEQ ID NO: 430 - protein, 808 aa, synthetic construct
MTCVLLKAVVESDERADLRQFSRILQLGEKRYLLRNDILDAFADYCRDQERPVPPPSESRLSKLVFYTQEIIVDNESLCWIVRPRIAQQEVCRLLVEDLTIVPMTIPELLDLRDRLVNHYHPNEGDVFEIDVQPFYDYSPIIRDAKNIGKGVEFLNRYLSSKLFQDPRQWQQNLFNFLRIHRYNGYQLLINERIRSPQHLSEQVKQALVVLSDRPPTEAYSEFRFELQNLGFEPGWGNTVARVRDTLEILDQLLDSPDHQVLEAFVSRIPMLFRIALISPHGWFGQEGVLGRPDTGGQVVYILDQVKSLEKQMREDLELAGLGVLEAQPKIIVLTRLIPNAEGTLCNQRLEKIYGTNDAWILRVPFREFNPKVTQNWISRFEIWPYLETFAIDAERELRAEFGHVPDLIIGNYSDGNLVAFLLARRLKVTQCNIAHALEKSKYLFSNLYWQDLEDKYHFSLQFTADLIAMNAANFIISSTYQEIVGTPDSIGQYESYQSFTMPDLYHVVNGIELFSPKFNVVPPGVNEQVYFPYTHYTERLEGDRQRLEELLFTLEDPSQIYGKLDNQNKRPLFSMARLDRIKNLTGLAECFGRSKALQERCNLILVAGKLRTEDSSDREERDEIEKLYQIIHEYNLHGKIRWLGIRLPKADSGEIYRIIADHQGIFVQPALFEAFGLTILEAMISGLPTFGTRFGGPLEIIQDGVNGFYINPTHLEEMAETIVRFIEACDRDPQQWQRISQAAIERVYSTYTWKIHCTRLLSLARIYGFWNFISQENREDMMRYMEALFHLLYKPRAQKLLAEHLQR

SEQ ID NO: 431 - protein, 808 aa, synthetic construct
MTCVLLKAVVESDERADLRQFSRILQLGEKRYLLRNDILDAFADYCRDQERPVPPPSESRLSKLVFYTQEIIVDNESLCWIVRPRIAQQEVCRLLVEDLTIVPMTIPELLDLRDRLVNHYHPNEGDVFEIDVQPFYDYSPIIRDAKNIGKGVEFLNRYLSSKLFQDPRQWQQNLFNFLRIHRYNGYQLLINERIRSPQHLSEQVKQALVVLSDRPPTEAYSEFRFELQNLGFEPGWGNTVARVRDTLEILDQLLDSPDHQVLEAFVSRIPMLFRIALISPHGWFGQEGVLGRPDTGGQVVYILDQVKSLEKQMREDLELAGLGVLEAQPKIIVLTRLIPNAEGTLCNQRLEKIYGTNDAWILRVPFREFNPKVTQNWISRFEIWPYLETFAIDAERELRAEFGHVPDLIIGNYSDGNLVAFLLARRLKVTQCNIAHALEKSKYLFSNLYWQDLEDKYHFSLQFTADLIAMNAANFIISSTYQEIVGTPDSIGQYESYQSFTMPDLYHVVNGIELFSPKFNVVPPGVNEQVYFPYYHYEERLESDRERLEELLFTLEDPEQIFGKLDDPSKRPLFSMARLDRIKNLTGLAECFGRSQALQERCNLILVAGKLRTEDSSDREEIDEIEKLYQIIHQYNLHGKIRWLGIRLPKADSGEIYRVIADRQGIFVQPALFEAFGLTILEAMISGLPTFATRFGGPLEIIQDGVNGFYINPTHLEEMAETIVRFIEACDQDPQQWERISKRGIDRVYSTYTWKIHTTRLLSLAKIYGFWNFTSQENREDMMRYMEALFHLLYKPRAQRLLAEHLQR

SEQ ID NO: 432 - protein, 808 aa, synthetic construct
MTSVLLKSVVESDERADLRQFSRILQLGEKRYLLRNDILDAFADYCRNQGRPVPPPSESRLSKLVFYTQEIIVDNESLCWIIRPRIAQQEVCRLLVEDLTIVPMTIPELLDLRDRLVNHYHPNEGDVFEIDVQPFYDYSPIIRDAKNIGKGVEFLNRYLSSKLFQDPRQWQQNLFNFLQIHRYNGYQLLINERIRSPQHLSEQVKQALVTLSDRAPAEAYSEFRFELQNLGFEPGWGNTVARVRDTLEILDQLLDSPDHQVLEAFVSRIPMLFRIALISPHGWFGQEGVLGRPDTGGQVVYILDQVKSLEKQMREDLELAGLGVLEAQPKIIVLTRLIPNAEGTLCNQRLEKIYGTNNAWILRVPFREFNPKVTQNWISRFEIWPYLETFAIDAERELRAEFGHVPDLIIGNYSDGNLVAFLLARRLKVTQCNIAHALEKSKYLFSNLYWQDLEDKYHFSLQFTADLIAMNAANFIISSTYQEIVGTPDSIGQYESYQSFTMPDLYHVVNGIELFSPKFNVVPPGVNEQVYFPYYHYTERLEGDRQRLEELLFTLEDPQQIYGYLEAPEKRPLFSMARLDRIKNLTGLAEAFGRSKALQERCNLILVAGKLRTADSSDREEIAEIEKLYQIIHQYNLHGKIRWLGIRLPKADSGEIYRIIADRQGIFVQPALFEAFGLTILEAMISGLPTFGTRFGGPLEIIQDGVNGFYINPTHLEEMAETIVRFLEACDRDPQEWQRISKAGIERVYSTYTWKIHCTRLLSLAKIYGFWNFSSQENREDMMRYMEALFHLLYKPRAQALLAEHLQR

SEQ ID NO: 433 - protein, 808 aa, synthetic construct
MTSVLLKAVVESDERADLRQFSRILQLGEKRYLLRNDILDAFADYCRNQERPVPPPSESRLSKLVFYTQEIIVDNESLCWIIRPRIAQQEVCRLLVEDLTIVPMTIPELLDLRDRLVNHYHPNEGDVFEIDVQPFYDYSPIIRDAKNIGKGVEFLNRYLSSKLFQDPRQWQQALFNFLRIHRYNGYQLLINERIRSPQQLSEQVKQALVVLSDRPPTEAYEEFRFELQNLGFEPGWGNTVARVRDTLEILDQLLDSPDHQVLEAFVSRIPMLFRIALISPHGWFGQEGVLGRPDTGGQVVYILDQVKSLEKQMQEDLELAGLGVLEAQPKIIVLTRLIPNSEGTLCNERLEKIYGTNNAWILRVPFREFNPKVTQNWISRFEIWPYLETFAIDAERELRAEFGHVPDLIIGNYSDGNLVAFLLARRMKVTQCNIAHALEKSKYLFSNLYWQDLEDKYHFSLQFTADLIAMNAANFIISSTYQEIVGTPDSIGQYESYQSFTMPDLYHVVNGIELFSPKFNVVPPGVNEQVYFPYYHYTERLEGDRQRLEELLFTLEDPQQIYGYLEAPEKRPLFSMARLDRIKNLTGLAEAFGRSKALQERCNLILVAGKLRTADSSDREEIAEIEKLYQIIHQYNLHGKIRWLGIRLPKADSGEIYRIIADRQGIFVQPALFEAFGLTILEAMISGLPTFGTRFGGPLEIIQDGVNGFYINPTHLEEMAETIVRFLEACDRDPQEWQRISKAGIERVYSTYTWKIHCTRLLSLAKIYGFWNFSSQENREDMMRYMEALFHLLYKPRAQALLAEHLQR

SEQ ID NO: 434 - protein, 808 aa, synthetic construct
MTSVLLKSVVESDERADLRQFSRILQTGEKGYLLRNDILNAFADYCRNQGRPVPPPSESRLSKLVFYTQEIIVDNESLCWIIRPRIAQQEVYRLLVEDLTIVPMTIPELLDLRDRLVNHYHPNEGDVFEIDVQPFYDYSPIIRDAKNIGKGVEFLNRYLSSKLFQDPRQWQQNLFNFLQIHRYNGYQLLINERIRSPQHLSEQVKQALVTLSDRAPAEAYSEFRFELQNLGFEPGWGNTVARVRDTLEILDQLLDSPDHQVLEAFVSRIPMLFRIALISPHGWFGQEGVLGRPDTGGQVVYILDQVKSLEKQMREDLELAGLGVLEARPKIIVLTRLIPNAEGTLCNQRLEKIYGTNDAWILRVPFREFNPKVTQNWISRFEIWPYLETFAIDAERELRAEFGHVPDLIIGNYSDGNLVAFLLARRLKVTQCNIAHALEKSKYLFSNLYWQDLEDKYHFSLQFTADLIAMNAANFIISSTYQEIVGTPDSIGQYESYQSFTMPDLYHVVNGIELFSPKFNVVPPGVNEQVYFPYYHYTERLEGDRQRLEELLFTLEDPQQIYGYLEAPEKRPLFSMARLDRIKNLTGLAEAFGRSKALQERCNLILVAGKLRTADSSDREEIAEIEKLYQIIHQYNLHGKIRWLGIRLPKADSGEIYRIIADRQGIFVQPALFEAFGLTILEAMISGLPTFGTRFGGPLEIIQDGVNGFYINPTHLEEMAETIVRFLEACDRDPQEWQRISKAGIERVYSTYTWKIHCTRLLSLAKIYGFWNFSSQENREDMMRYMEALFHLLYKPRAQALLAEHLQR

SEQ ID NO: 435 - protein, 808 aa, synthetic construct
MTSVLLKAVVESDERADLRQFSRILQLGEKRYLLRNDILGAFADYCRNQGRPVPPPSSSRLSKLVFYTQEIIVDNESLCWIIRPRIAQQEVCRLLVEDLTIVPMTIPELLDLRDRLVNHYHPNEGDVFEIDVQPFYDYSPIIRDAKNIGKGVEFLNRYLSSKLFQDPRQWQQNLFNFLQIHRYNGYQLLINERIRSPQHLSEQVKQALVVLSDRAPDEAYSEFRFELQNLGFEPGWGNTVARVRDTLEILDQLLDSPDHQVLEAFVSRIPMLFRIALISPHGWFGQEGVLGRPDTGGQVVYILDQVKSLEKQMQEDLELAGLGVLEAQPKIIVLTRLIPNCEGTLCNQRLEKIYGTNNAWILRVPFREFNPKVTQNWITRFEIWPYLETFAIDAERELRAEFGHVPDLIIGNYSDGNLVAFLLARRMKVTQCNIAHALEKSKYLFSNLYWQDLEDKYHFSLQFTADLIAMNAANFIISSTYQEIVGTPDSIGQYESYQSFTMPDLYHVVNGIELFSPKFNVVPPGVNEQVYFPYYHYTERLEGDRQRLEELLFTLEDPQQIYGYLEAPEKRPLFSMARLDRIKNLTGLAEAFGRSKALQERCNLILVAGKLRTADSSDREEIAEIEKLYQIIHQYNLHGKIRWLGIRLPKADSGEIYRIIADRQGIFVQPALFEAFGLTILEAMISGLPTFGTRFGGPLEIIQDGVNGFYINPTHLEEMAETIVRFLEACDRDPQEWQRISKAGIERVYSTYTWKIHCTRLLSLAKIYGFWNFSSQENREDMMRYMEALFHLLYKPRAQALLAEHLQR

SEQ ID NO: 436 - protein, 808 aa, synthetic construct
MTSVLLKAVVESDERADLRQFSRILQTGEKRYLLRNDILDAFADYCRNQGRPVPPPSESRLSKLVFYTQEIIVDNESLCWIIRPRIAQQEVCRLLVEDLTIVPMTIPELLDLRDRLVNHYHPNEGDVFEIDVQPFYDYSPIIRDAKNIGKGVEFLNRYLSSKLFQDPRQWQQTLFNFLRIHRYNGYQLLINERIRSPQHLSEQVKQALVTLSDRAPAEPYSEFRFELQNLGFEPGWGNTVARVRDTLEILDQLMDSPDHQVLEAFVSRIPMLFRIALISPHGWFGQEGVLGRPDTGGQVVYILDQVKSLEKQMQEDLELAGLGVLEAQPKIIVLTRLIPNAEGTLCNQRLEKIYGTNDAWILRVPFREFNPKVTQNWISRFEIWPYLETFAIDAETELRAEFGHVPDLIIGNYSDGNLVAFLLARRLKVTQCNIAHALEKSKYLFSNLYWQDLEDKYHFSLQFTADLIAMNAANFIISSTYQEIVGTPDSIGQYESYQSFTMPDLYHVVNGIELFSPKFNVVPPGVNEQVYFPYYHYTERLEGDRQRLEELLFTLEDPQQIYGYLEAPEKRPLFSMARLDRIKNLTGLAEAFGRSKALQERCNLILVAGKLRTADSSDREEIAEIEKLYQIIHQYNLHGKIRWLGIRLPKADSGEIYRIIADRQGIFVQPALFEAFGLTILEAMISGLPTFGTRFGGPLEIIQDGVNGFYINPTHLEEMAETIVRFLEACDRDPQEWQRISKAGIERVYSTYTWKIHCTRLLSLAKIYGFWNFSSQENREDMMRYMEALFHLLYKPRAQALLAEHLQR

SEQ ID NO: 437 - protein, 808 aa, synthetic construct
MTSVLLKAVVESEERADLRQFSRILQLGEKRYLLRNDILDAFADYCRNQERPVPPPSESRLSKLVFYTQEIIFDNESLCWIIRPRIAQQEVCRLLVEDLTIVPMTIPELLDLRDRLVNHYHPNEGDVFEIDVQPFYDYSPIIRDAKNIGKGVEFLNRYLSSKLFQDPRQWQQNLFNFLQIHRYNGYQLLINERIRSPQHLSEQVKQALVTLSDRAPAAAYSEFRFELQNLGFEPGWGNTVARVRDTLEILDQLLDSPDHQVLEAFVSRIPMLFRIALISPHGWFGQEGVLGRPDTGGQVVYILDQVKSLEKQLREDLELAGLGVLEAQPKIIVLTRLIPNAEGTLCNQRLEKIYGTNDAWILRVPFREFNPKVTQNWISRFEIWPYLETFAIDAERELRAEFGHVPDLIIGNYSDGNLVAFLLARRLKVTQCNIAHALEKSKYLFSNLYWQDLEDKYHFSLQFTADLIAMNAANFIISSTYQEIVGTPDSIGQYESYQSFTMPDLYHVVNGIELFSPKFNVVPPGVNEQVYFPYYHYTERLEGDRQRLEELLFTLEDPQQIYGYLEAPEKRPLFSMARLDRIKNLTGLAEAFGRSKALQERCNLILVAGKLRTADSSDREEIAEIEKLYQIIHQYNLHGKIRWLGIRLPKADSGEIYRIIADRQGIFVQPALFEAFGLTILEAMISGLPTFGTRFGGPLEIIQDGVNGFYINPTHLEEMAETIVRFLEACDRDPQEWQRISKAGIERVYSTYTWKIHCTRLLSLAKIYGFWNFSSQENREDMMRYMEALFHLLYKPRAQALLAEHLQR

SEQ ID NO: 438 - protein, 808 aa, synthetic construct
MTSVLLKSVVESDERADLRQFSRILQLGEKGYLLRNDILDAFADYCRNQGRPVPPPSESRLSKLVFYTQEIIVDNESLCWIIRPRIAQQEVCRLLVEDLTIVPMTIPELLDLRDRLVNHYHPNEGDVFEIDVQPFYDYSPIIRDAKNIGKGVEFLNRYLSSKLFQDPRQWQQNLFNFLQIHRYNGYQLLINERIRSPQHLSEQVKQALVTLSDRAPAEPYSEFRFELQNLGFEPGWGNTVARVRDTLEILDQLLDSPDHQVLEAFVSRIPMLFRIALISPHGWFGQEGVLGRPDTGGQVVYILDQVKSLEKQMQEDLELAGLGVLEARPKIIVLTRLIPNAEGTLCNQRLEKIYGTNNAWILRVPFREFNPKVTQNWISRFEIWPYLETFAIDAERELRAEFGHVPDLIIGNYSDGNLVAFLLARRMKVTQCNIAHALEKSKYLFSNLYWQDLEDKYHFSLQFTADLIAMNAANFIISSTYQEIVGTPDSIGQYESYQSFTMPDLYHVVNGIELFSPKFNVVPPGVNEQVYFPYYHYTERLEGDRQRLEELLFTLEDPQQIYGYLEAPEKRPLFSMARLDRIKNLTGLAEAFGRSKALQERCNLILVAGKLRTADSSDREEIAEIEKLYQIIHQYNLHGKIRWLGIRLPKADSGEIYRIIADRQGIFVQPALFEAFGLTILEAMISGLPTFGTRFGGPLEIIQDGVNGFYINPTHLEEMAETIVRFLEACDRDPQEWQRISKAGIERVYSTYTWKIHCTRLLSLAKIYGFWNFSSQENREDMMRYMEALFHLLYKPRAQALLAEHLQR

SEQ ID NO: 439 - protein, 808 aa, synthetic construct
MTSVLLKAVVESDERADLRQFSRILQLGEKRYLLRNDILNAFADYCRNQGRPVPPPDSSRLSKLVFYTQEIIVDNESLCWIIRPRIAQQEVCRLLVEDLTIVPMTIPELLDLRDRLVNHYHPNEGDVFEIDVQPFYDYSPIIRDAKNIGKGVEFLNRYLSSKLFQDPRQWQQTLFNFLRIHRYNGYQLLINERIRSPQHLSEQVKQALVFLSDRAPDEAYSEFRFELQNLGFEPGWGNTAARVRDTLEILDQLLDSPDHQVLEAFVSRIPMLFRIALISPHGWFGQEGVLGRPDTGGQVVYILDQAKSLEKQMQEDLELAGLGVLEAQPKIIVLTRLIPNSEGTLCNQRLEKIYGTNNAWILRVPFREFNPKVTQNWISRFEIWPYLETFAIDAETELRAEFGHVPDLIIGNYSDGNLVAFLLARRMKVTQCNIAHALEKSKYLFSNLYWQDLEDKYHFSLQFTADLIAMNAANFIISSTYQEIVGTPDSIGQYESYQSFTMPDLYHVVNGIELFSPKFNVVPPGVNEQVYFPYYHYTERLEGDRQRLEELLFTLEDPQQIYGYLEAPEKRPLFSMARLDRIKNLTGLAEAFGRSKALQERCNLILVAGKLRTADSSDREEIAEIEKLYQIIHQYNLHGKIRWLGIRLPKADSGEIYRIIADRQGIFVQPALFEAFGLTILEAMISGLPTFGTRFGGPLEIIQDGVNGFYINPTHLEEMAETIVRFLEACDRDPQEWQRISKAGIERVYSTYTWKIHCTRLLSLAKIYGFWNFSSQENREDMMRYMEALFHLLYKPRAQALLAEHLQR

SEQ ID NO: 440 - protein, 808 aa, synthetic construct
MTSVLLKAVVESDERADLRQFSRILQLGEKRYLLRNDILDAFHDYCRNQGRPVPPPSESRLSKLIFYTQEIIVDNESLCWIIRPRIAQQEVYRLLVEDLTIVPMTIPELLDLRDRLVNHYHPNEGDVFEIDVQPFYDYSPIIRDAKNIGKGVEFLNRYLSSKLFQDPRQWQQNLFNFLQIHRYNGYQLLINERIRSPQHLSEQVKQALVTLSDRASAEAYSEFRFELQNLGFEPGWGNTVARVRDTLEILDQLMDSPDHQVLEAFVSRIPMLFRIALISPHGWFGQEGVLGRPDTGGQVVYILDQVKSLEKQMQEDLELAGLGVLEAQPKIIVLTRLIPNCEGTLCNQRLEKIYGTNNAWILRVPFREFNPKVTQNWISRFEIWPYLETFAIDAERELRAEFGHVPDLIIGNYSDGNLVAFLLARRLKVTQCNIAHALEKSKYLFSNLYWQDLEDKYHFSLQFTADLIAMNAANFIISSTYQEIVGTPDSIGQYESYQSFTMPELYHVVNGIELFSPKFNVVPPGVNEQVYFPYYHYTERLEGDRQRLEELLFTLEDPQQIYGYLEAPEKRPLFSMARLDRIKNLTGLAEAFGRSKALQERCNLILVAGKLRTADSSDREEIAEIEKLYQIIHQYNLHGKIRWLGIRLPKADSGEIYRIIADRQGIFVQPALFEAFGLTILEAMISGLPTFGTRFGGPLEIIQDGVNGFYINPTHLEEMAETIVRFLEACDRDPQEWQRISKAGIERVYSTYTWKIHCTRLLSLAKIYGFWNFSSQENREDMMRYMEALFHLLYKPRAQALLAEHLQR

SEQ ID NO: 441 - protein, 808 aa, synthetic construct
MTSVLLKSVVESEERADLRQFSRILQLGEKRYLLRNDILGAFADYCRNQGRPVPPPSSSRLSKLVFYTQEIIVDNESLCWIIRPRIAQQEVCRLLVEDLTIVPMTIPELLDLRDRLVNRYHPNEGDVFEIDVQPFYDYSPIIRDAKNIGKGVEFLNRYLSSKLFQDPRQWQQTLFNFLQIHRYNGYQLLINERIRSPQQLSEQVKQALVVLSDRAPDEAYSEFRFELQNLGFEPGWGNTVARVRDTLEILDQLLDSPDHQVLEAFVSRIPMLFRIALISPHGWFGQEGVLGRPDTGGQVVYILDQVKSLEKQLQEDLELAGLGVLEAQPKIIVLTRLIPNAEGTLCNQRLEKIYGTNDAWILRVPFREFNPKVTQNWISRFEIWPYLETFAIDAETELRAEFGHVPDLIIGNYSDGNLVAFLLARRMKVTQCNIAHALEKSKYLFSNLYWQDLEDKYHFSLQFTADLIAMNAANFIISSTYQEIVGTPDSIGQYESYQSFTMPDLYHVVNGIELFSPKFNVVPPGVNEQVYFPYYHYTERLEGDRQRLEELLFTLEDPQQIYGYLEAPEKRPLFSMARLDRIKNLTGLAEAFGRSKALQERCNLILVAGKLRTADSSDREEIAEIEKLYQIIHQYNLHGKIRWLGIRLPKADSGEIYRIIADRQGIFVQPALFEAFGLTILEAMISGLPTFGTRFGGPLEIIQDGVNGFYINPTHLEEMAETIVRFLEACDRDPQEWQRISKAGIERVYSTYTWKIHCTRLLSLAKIYGFWNFSSQENREDMMRYMEALFHLLYKPRAQALLAEHLQR

SEQ ID NO: 442 - protein, 808 aa, synthetic construct
MTSVLLKAVVESDERADLRQFSRILQTGEKRYFLRNDILDAFADYCRNQERPVPPPDSSRLSKLVFYTQEIIFDNESLCWIIRPRIAQQEVCRLLVEDMTIVPMTIPELLDLRDRLVNHYHPNEGDVFEIDVQPFYDYSPIIRDAKNIGKGVEFLNRYLSSKLFQDPRQWQQNLFNFLQIHRYNGYQLLINERIRSPQHLSEQVKQALVTLSDRASDEAYEEFRFELQNLGFEPGWGNTVARVRDTLEILDQLLDSPDHQVLEAFVSRIPMLFRIALISPHGWFGQEGVLGRPDTGGQVVYILDQVKSLEKQMQEDLELAGLGVLEAQPKIIVLTRLIPNSEGTLCNQRLEKIYGTNNAWILRVPFREFNPKVTQNWISRFEIWPYLETFAIDAERELRAEFGHVPDLIIGNYSDGNLVAFLLARRMKVTQCNIAHALEKSKYLFSNLYWQDLEDKYHFSLQFTADLIAMNAANFIISSTYQEIVGTPDSIGQYESYQSFTMPDLYHVVNGIELFSPKFNVVPPGVNEQVYFPYYHYTERLEGDRQRLEELLFTLEDPQQIYGYLEAPEKRPLFSMARLDRIKNLTGLAEAFGRSKALQERCNLILVAGKLRTADSSDREEIAEIEKLYQIIHQYNLHGKIRWLGIRLPKADSGEIYRIIADRQGIFVQPALFEAFGLTILEAMISGLPTFGTRFGGPLEIIQDGVNGFYINPTHLEEMAETIVRFLEACDRDPQEWQRISKAGIERVYSTYTWKIHCTRLLSLAKIYGFWNFSSQENREDMMRYMEALFHLLYKPRAQALLAEHLQR

SEQ ID NO: 443 - protein, 808 aa, synthetic construct
MTSVLLKSVVESDERADLRQFSRILQLGEKRYLLRNDILGAFADYCRALGRPVPTPSESRLSKLVFYTQEIIVDNESLCWIIRPRIAQQEVCRLLVEDLTIVPMTIPELLDLRDRLVNRYHPNEGDVFEIDVQPFYDYSPIIRDAKNIGKGVEFLNRYLSSKLFQDPRQWQQNLFNFLQIHRYNGYQLLINERIRSPQQLSEQVKQALVTLSDRASDEAYSEFRFELQNLGFEPGWGNTAARVRDTLEILDQLLDSPDHQVLEAFVSRIPMLFRIALISPHGWFGQEGVLGRPDTGGQVVYILDQVKSLEKQMREDLELAGLGVLEARPKIIVLTRLIPNSEGTLCNQRLEKIYGTNNAWILRVPFREFNPKVTQNWISRFEIWPYLETFAIDAERELRAEFGHVPDLIIGNYSDGNLVAFLLARRMKVTQCNIAHALEKSKYLFSNLYWQDLEDKYHFSMQFTADLIAMNAANFIISSTYQEIVGTPDSIGQYESYQSFTMPDLYHVVNGIELFSPKFNVVPPGVNEQVYFPYYHYTERLEGDRQRLEELLFTLEDPQQIYGYLEAPEKRPLFSMARLDRIKNLTGLAEAFGRSKALQERCNLILVAGKLRTADSSDREEIAEIEKLYQIIHQYNLHGKIRWLGIRLPKADSGEIYRIIADRQGIFVQPALFEAFGLTILEAMISGLPTFGTRFGGPLEIIQDGVNGFYINPTHLEEMAETIVRFLEACDRDPQEWQRISKAGIERVYSTYTWKIHCTRLLSLAKIYGFWNFSSQENREDMMRYMEALFHLLYKPRAQALLAEHLQR

SEQ ID NO: 444 - protein, 808 aa, synthetic construct
MTSVLLKAVVESDERADLRQFSRILQTGEKRYFLRNDILDAFADYCRNQGRPVPPPSSSRLSKLIFYTQEIIVDNESLCWIIRPRIAQQEVCRLLVEDLTIVPMTIPELLDLRDRLVNHYHPNEGDVFEIDVQPFYDYSPIIRDAKNIGKGVEFLNRYLSSKLFQDPRQWQQNLFNFLQIHRYNGYQLLINERIRSPQHLSEQVKQALVTLSDRAPAEPYEEFRFELQNLGFEPGWGNTVARVRDTLEILDQLMDSPDHQVLEAFVSRIPMLFRIALISPHGWFGQEGVLGRPDTGGQVVYILDQAKSLEKQLQEDLELAGLGVLEARPKIIVLTRLIPNAEGTLCNQRLEKIYGTNNAWILRVPFREFNPKVTQNWISRFEIWPYLETFAIDAETELRAEFGHVPDLIIGNYSDGNLVAFLLARRLKVTQCNIAHALEKSKYLFSNLYWQDLEDKYHFSLQFTADLIAMNAANFIISSTYQEIVGTPDSIGQYESYQSFTMPELYHVVNGIELFSPKFNVVPPGVNEQVYFPYYHYTERLEGDRQRLEELLFTLEDPQQIYGYLEAPEKRPLFSMARLDRIKNLTGLAEAFGRSKALQERCNLILVAGKLRTADSSDREEIAEIEKLYQIIHQYNLHGKIRWLGIRLPKADSGEIYRIIADRQGIFVQPALFEAFGLTILEAMISGLPTFGTRFGGPLEIIQDGVNGFYINPTHLEEMAETIVRFLEACDRDPQEWQRISKAGIERVYSTYTWKIHCTRLLSLAKIYGFWNFSSQENREDMMRYMEALFHLLYKPRAQALLAEHLQR

SEQ ID NO: 445 - protein, 808 aa, synthetic construct
MTSVLLKSVVDSEERADLRQFSRILQLGEKGYLLRNDILDAFADYCRNQGRPVPPPSESRLSKLVFYTQEIIVDNESLCWIIRPRIAQQEVCRLLVEDLTIVPMTIPELLDLRDRLVNHYHPNDGDLFEIDVQPFYDYSPIIRDAKNIGKGVEFLNRYLSSKLFQDPRQWQQTLFNFLQIHRYNGYQLLINERIRSPQQLSEQVKQALVTLSDRAPAAAYQEFRFELQNLGFEPGWGNTVARVRDTLEILDQLLDSPDHQVLEAFVSRIPMLFRIALVSPHGWFGQEGVLGRPDTGGQVVYILDQVKSLEKQMQEDLELAGLGVLEARPKIIVLTRLIPNCEGTLCNQRLEKIYGTNNAWILRVPFREFNPKVTQNWISRFEIWPYLETFAIDAERELRAEFGHVPDLIIGNYSDGNLVAFLLARRLKVTQCNIAHALEKSKYLFSNLYWQDLEDKYHFSLQFTADLIAMNAANFIISSTYQEIVGTPDSIGQYESYQSFTMPDLYHVVNGIELFSPKFNVVPPGVNEQVYFPYYHYTERLEGDRQRLEELLFTLEDPQQIYGYLEAPEKRPLFSMARLDRIKNLTGLAEAFGRSKALQERCNLILVAGKLRTADSSDREEIAEIEKLYQIIHQYNLHGKIRWLGIRLPKADSGEIYRIIADRQGIFVQPALFEAFGLTILEAMISGLPTFGTRFGGPLEIIQDGVNGFYINPTHLEEMAETIVRFLEACDRDPQEWQRISKAGIERVYSTYTWKIHCTRLLSLAKIYGFWNFSSQENREDMMRYMEALFHLLYKPRAQALLAEHLQR

SEQ ID NO: 446 - protein, 808 aa, synthetic construct
MTSVLLKSVVESDERADLRQFSRILQTGEKRYLLRNDILNAFADYCRNQGRPVPPPSESRLSKLVFYTQEIIVDDESLCWIIRPRIAQQEVYRLLVEDLTIVPMTIPELLDLRDRLVNRYHPNEGDVFEIDVQPFYDYSPIIRDAKNIGKGVEFLNRYLSSKLFQDPRQWQQALFNFLQIHRYNGYQLLINERIRSPQHLSEQVKQALVFLSDRAPDEAYSEFRFELQNLGFEPGWGNTAARVRDTLEILDQLIDSPDHQVLEAFVSRIPMLFRIALISPHGWFGQEGVLGRPDTGGQVVYILDQVKSLEKQLQEDLELAGLGVLEAQPKIIVLTRLIPNSEGTLCNQRLEKVYGTNNAWILRVPFREFNPKVTQNWISRFEIWPYLETFAIDAERELRAEFGHHPDLIIGNYSDGNLVAFLLARRMKVTQCNIAHALEKSKYLFSNLYWQDLEDKYHFSLQFTADLIAMNAANFIISSTYQEIVGTPDSIGQYESYQSFTMPDLYHVVNGIELFSPKFNVVPPGVNEQVYFPYYHYTERLEGDRQRLEELLFTLEDPQQIYGYLEAPEKRPLFSMARLDRIKNLTGLAEAFGRSKALQERCNLILVAGKLRTADSSDREEIAEIEKLYQIIHQYNLHGKIRWLGIRLPKADSGEIYRIIADRQGIFVQPALFEAFGLTILEAMISGLPTFGTRFGGPLEIIQDGVNGFYINPTHLEEMAETIVRFLEACDRDPQEWQRISKAGIERVYSTYTWKIHCTRLLSLAKIYGFWNFSSQENREDMMRYMEALFHLLYKPRAQALLAEHLQR

SEQ ID NO: 447 - protein, 808 aa, synthetic construct
MTSVLLKSVIESDERADLRQFSRILQLGEKRYLLRNDILNAFAEYCRNQGRPVPPPSESRLSKLVFYTQEIIFDNESLCWIIRPQIAQQEVYRLLVEDLTVVPMTIPELLDLRDRLVNHYHPNEGDVFEIDVQPFYDYSPIIRDAKNIGKGVEFLNRYLSSKLFQDPRQWQQALFNFLQIHRYNGYQLLINERIRSPQQLSEQVKQALVTLSDRAPDEPYSEFRFELQNLGFEPGWGNTVARVRDTLEILDQLLDSPDHQVLEAFVSRIPMLFRIALISPHGWFGQEGVLGRPDTGGQVVYILDQVKSLEKQMQEDLELAGLGVLEARPKIIVLTRLIPNAEGTLCNQRLEKIYGTNNAWILRVPFREFNPKVTQNWITRFEIWPYLETFAIDAERELRAEFGHVPDLIIGNYSDGNLVAFLLARRMKVTQCNIAHALEKSKYLFSNLYWQDLEDKYHFSLQFTADLIAMNAANFIISSTYQEIVGTPDSIGQYESYQSFTMPDLYHVVNGIELFSPKFNVVPPGVNEQVYFPYYHYTERLEGDRQRLEELLFTLEDPQQIYGYLEAPEKRPLFSMARLDRIKNLTGLAEAFGRSKALQERCNLILVAGKLRTADSSDREEIAEIEKLYQIIHQYNLHGKIRWLGIRLPKADSGEIYRIIADRQGIFVQPALFEAFGLTILEAMISGLPTFGTRFGGPLEIIQDGVNGFYINPTHLEEMAETIVRFLEACDRDPQEWQRISKAGIERVYSTYTWKIHCTRLLSLAKIYGFWNFSSQENREDMMRYMEALFHLLYKPRAQALLAEHLQR

SEQ ID NO: 448 - protein, 808 aa, synthetic construct
MTSVLLKSVIESDERTDLRQFSRILQTGEKGYLLRNDILDAFHDYCRNQGRPVPPPLSSRLSKLVFYTQEIIVDNESLCWIIRPRIAQQEVCRLLVEDLTIVPMTIPELLDLRDRLVNHYHPNEGDVFEIDVQPFYDYSPIIRDAKNIGKGVEFLNRYLSSKLFQDPRQWQQNLFNFLQIHRYNGYQLLINERIRSPQHLSEQVKQALVTLSDRASAEAYEEFRFELQNLGFEPGWGNTVARVRDTLEILDQLMDSPDHQVLEAFVSRIPMLFRIALISPHGWFGQEGVLGRPDTGGQVVYILDQVKSLEKQMQEDLELAGLGVLEAQPKIIVLTRLIPNAEGTLCNQRLEKIYGTNNAWILRVPFREFNPKVTQNWISRFEIWPYLETFAIDAEKELRAEFGHVPDLIIGNYSDGNLVAFLLARRMKVTQCNIAHALEKSKYLFSNLYWQDLEDKYHFSLQFTADLIAMNAANFIISSTYQEIVGTPDSIGQYESYQSFTMPDLYHVVNGIELFSPKFNVVPPGVNEQVYFPYYHYTERLEGDRQRLEELLFTLEDPQQIYGYLEAPEKRPLFSMARLDRIKNLTGLAEAFGRSKALQERCNLILVAGKLRTADSSDREEIAEIEKLYQIIHQYNLHGKIRWLGIRLPKADSGEIYRIIADRQGIFVQPALFEAFGLTILEAMISGLPTFGTRFGGPLEIIQDGVNGFYINPTHLEEMAETIVRFLEACDRDPQEWQRISKAGIERVYSTYTWKIHCTRLLSLAKIYGFWNFSSQENREDMMRYMEALFHLLYKPRAQALLAEHLQR

SEQ ID NO: 449 - protein, 440 aa, synthetic construct
PPREVVAVPWLALGHVNPLLRLAEALSPRGFTFHLVLPNAGPLPESFLRPLRYSNSIHLVELHLPELPELPPHYHTTNGLPPHLNGIQAALARAALPDVRAVLARLDPVAVLLDFLMMEHAEVARELGIPVIPFFTSSATLFLRFRDFLKRPGHEFPFPEIPVAQVLRENARRLFGTGPTEKDFLAPGNAGIVLLFTSPHVEPEAIANATGPGTAEVIPVGPPFQDPNTEDNDDPPLVAWLNTQPPRSVLYISFGSEYYLPLPNLENLCEALAKSKYPFIFVTRFPKGEEQNLEDVLPKGFLEKTKNRGLVLDHLVPQAEILRHPALGGFISHCGWNSVCESLKYGIPIVCMPMQWDQPINAKELEKLGVGKTIRRDEDGRIHAEEILRAIEEVMEGETGKKIREVTEALAKALQTDSQANIDRFFERARALAADPAARA

SEQ ID NO: 450 - protein, 440 aa, synthetic construct
PPREVVAVPWLALGHVNPLLRLFEDFAPLGFRGHLVLPNAGPLSPAFLLPLLYSNSIHLVELHLPELPELPPHYHTTNGLPPHLNGIYADLMRKALPDVREVLEKLNPVALLTDFLTMAAAEVARELGIPVVPVFTSSARLFLRFLDFLKRPGHEFPFPEIPVARDLRENARRLFGTGPTEKDFLAPGNAGIALLFSSPYIEPEAIANATGPGTVEVIPVGPPFQDPNTEDNDDPPLVAWLRTKPPRSVIYASFGSEYYLPLENLENLCRALEASDYPFIFVTRFPKGEEQNLEDVLPKGFLEATKDRGLVLSHLVPQAEILRHPALGGFISHCGWNSVCESLYNGIPIICMPMQWDQPINAELLEELGVGVTIRRDEDGRIHEEEILAAIKRVMSGPEGEKIRENVLKLAEELKKSYRENIERAFRRIRELAEDPALRA

SEQ ID NO: 451 - protein, 440 aa, synthetic construct
PPKDVVFVPWLALGHVNPLLRLAEDLDPLGFRVHIVLPNTGPLSESFLRPLRYSNSIHLVELHLPELPELPPHYHTTNGLPPHLNGIYYDLALKALPDVRAVLARLDPVAVITDFLMMVNARVARELGIPVVPFFTSSARLLLRFYDFLKRPGHEFPFPEIPTAKILRANARALFGTGPTEKDFLAPGNAGIILLFTSPAVEPEEVAAATGPGRAEVIPVGPPFQDPNTEDNDDPPLAAWLNTKPARSVIYCSFGSEYYLPRYNLENLCEALAKSDYYFIFVTRFPKGEEQNLEDVLPKGFLEKTKDKGLVLDHLVPQAEILRHPALGAFISHCGWNSVCESLYNGIPIICMPMQWDQPINAEFLEELGVGITIRRDEDGRIHSEEILKAIEEVVKGETGKKIREKVEALAKALKQTYRENIERFYRRMLELAADPAKRA

SEQ ID NO: 452 - protein, 440 aa, synthetic construct
PPREVVFVPWLALGHVNPLLRLAEDLAPRGFRVHIVLPNAGPLSERFLRPLRYSNSIHLVELHLPELPELPPHYHTTNGLPPHLNGVQALLTLAARPDVAAVLDRLAPVALVTDFLTMAVAEVARERGIPVIPFFTSSARLFLRFREFLKRPGHEFPFPEIPVARFLRANARRLFGTGPTEKDFLAPGNAGIVLLFTSPAIEPEAVAAATGPGTPEVIPVGPPFQDPNTEDNDDPPLVAWLNTKPPESVLYVSFGSEYYLPLPNLNALCEALAASDIPWIFVTRFPKGEEQNLEDVLPKGFLEKTKDKGLVLDHLVPQAEILRHPALGGFLSHCGWNSVCESLYYGIPIVAMPMQWDQPINAALLEELGVAVTIRRDEDGRIHPEEILAAIREVMSGPRGEAIRARVRALAEALRRDHQANIDRFFERARALAADPALRA

SEQ ID NO: 453 - protein, 440 aa, synthetic construct
QPMRIMMFPWLALGHVNPFLRIAKQLADRGFVIYLVSTAINLELAAKRIPARYSDRIHLVEFELPELPELPPHLHTTNGLPPHLNGTLHKALKAAAPRLAAQVRELQPDLVLYDFLIPWAEDIALSHGVPGVPLLTSGAALFSYFFNFLKRPGHEFPFPEIRLSKREQDKMREMFGTEPTELDFLVPANAGIMLMCTSREIEAPYLDYCEELTGVKVVPVGAPFQDPLTEDIYDPELIAWLDTKPPGSVVYVSFGSEYFLSREQMEEVARGLLESGVNFIWVARFPKGEEQPLEDVLPPGFLEAIGDRGRVLDHLVPQAHILNHPATGGFISHCGWNSVMESIDFGVPIIAMPMQWDQPINARLLVAKGVAVEIRRDEDGRIHAEEIARVLREVIFGPKGEELRARVAALSAALRARRDEEFDAAAEALRELCRNRRALK

SEQ ID NO: 454 - protein, 440 aa, synthetic construct
QPIRILMFPWLALGHVNPFLRIAKQLAARGFHIYLVSTAINLELAKKRIPAEYADSIHLVEYALPELPELPPHLHTTNGLPPHLNGTLHKALKMSAPEFAKQVQELQPDLVLYDFLIPWAEKIAAAHGVPGVPLLTSGAALFSYFFNFLKRPGHEFPFPAIRLSKREQDKMREMFGTEPTELDFLVPANAGIMLMCTSRVIEARYLEYCQKLTGVKVVPVGAPFQDPLTEDIYDPELIAWLDTKPDGSVVYVSFGSEYFLSREQMREVAEGLLLSGQYFIWVARFPKGEEQPLEEVLPEGFLERVGDKGRVLDHLVPQAHILNHKATGGFISHCGWNSVMESIDFGVPIIAMPMQWDQPINARLLVELGVAVEIRRDEDGRIHRETIAEVIKEVINGELGKKLRENVKKIALELRANREKEMDEAAAALAELCRNRRALK

SEQ ID NO: 455 - protein, 440 aa, synthetic construct
QPLKILMFPWLALGHVNPFLRIAKQLADRGFHIYLVSTAINLELAKKRIPEKYKNRIHLVEYKLPELPELPPHLHTTNGLPPHLNGTLHKALKASAPELKKIVEELKPDLVLYDFLIPWAEKIAASLGVPGVPLLTSGAALFSYFFNFLKRPGHEFPFPEIRLSKREQDKMREMFGTEPTELDFLVPANAGVMLMCTSRVIEAEYLDYCEKLTGVEVVPVGAPFQDPLTEDIYDPELIAWLDTKPDNSVVYVSFGSEYFLSREQMEEVALGLELSGVYFIWVARFPKGEEQPLEDVLPKGFLERVGDRGRVLDHLVPQAHILNHKSTGGFISHCGWNSVMESIDFGVPIIAMPMQWDQPINARLLVKLGVAVEIRRDEDGRIHRDEIARVLKEVIYGETGKKLRANVKKISEELRARREEEMDAAAERLAQLCRNRRALK

SEQ ID NO: 456 - protein, 440 aa, synthetic construct
QPIQVLMFPWLALGHVNPFLRIAKQLADRGFHIYLVSTAINLELAKKRIPEKYKDRIHLVEYELPELPELPPHLHTTNGLPPHLNGTLHKALKMSAPEFEKIVQELQPDLVLYDFLIPWAEKIALSLGVPGVPLLTSGAALFSYFFNFLKRPGHEFPFPAIRLSKREQDKMREMFGTEPTELDFLVPANAGIMLMCTSRVIEAKYLDYCQKLTNVKVVPVGAPFQDPLTEDIYDPELIRWLDTQPEGSVVYVSFGSEYFLSREQMREVAEGLLESGVNFIWVARFPKGEEQPLEDVLPEGFLERVGDRGRVLDHLVPQAHILNHKSTGGFISHCGWNSVMESIDFGVPIIAMPMQWDQPINARLLVELGVAVEIRRDEDGRIHREEIARVLKEVISGELGKILREKVREIAEQLRAQRQAEMDEAAAELAALCRNRRALK

SEQ ID NO: 457 - protein, 440 aa, synthetic construct
QPMKILMFPWLALGHVNPFLRIAKQLADRGFHIYLVSTKINLELAKKRIPEKYKDKIHLVEYALPELPELPPHLHTTNGLPPHLNGTLHKALKMAAPEFAKIVENLKPDLVLYDFLIPWAEKVAESHGVPGVPLLTSGAALFSYFFNFLKRPGHEFPFPAIRLSKREQDKMREMFGTEPTELDFLVPANAGIMLMCTSRVIEAEYLDYCQKLTGVEVVPVGAPFQDPLTEDIYDPELIAWLDTKPPNSVVYVSFGSEYFLSREQMEAVAEGLLKSGAYFIWVARFPKGEEQNLEDVLPKGFLEAVGDRGRVLDHLVPQAHILNHPSTGGFISHCGWNSVMESIDFGVPIIAMPMQWDQPINARLLVELGVAVEIERDEDGRIHPDTIARVIKDVISGPLGEKLRANVREIALRLRARREEEMDEAAERLAELCRNRRALK

SEQ ID NO: 458 - protein, 440 aa, synthetic construct
QQPKVLMFPWLALGHVNPFLRIAKQLADRGFHIYLVSTAINLELAKKRIPNKYKDKIHLVEYHLPELPELPPHLHTTNGLPPHLNGTLHKALKMSAPRFAEQVKSLDVDLVLYDFLIPWAEKVAASHGVPGVPLLTSGAALFSYFFNFLKRPGHEFPFPAIRLSKREQDKMREMFGTEPTELDFLVPANAGIMLMCTSRVIEAKYLDYCQKLTNVKVVPVGAPFQDPLTEDIYDPELIRWLDEKDKNSVVYVSFGSEYFLSREQMTEVAFGLEASGVNFIWVARFPKGEEQNLEDVLPKGFLEEVKGRGRVLDHLVPQAHILNHKSTGGFISHCGWNSVMESIDFGVPIIAMPMQWDQPINARLLVELGVAVEIRRDEDGRIHSEDIKEVLKEVIYGKKGEELRKRVRKIALELRAYREAEMDAASEELTALCRNRRALK

SEQ ID NO: 459 - protein, 440 aa, synthetic construct
QPLKVLMFPWLALGHVNPFLRIAKQLADRGFHIYLVSTAINLELAKKRIPEKYKNRIHLVEYELPELPELPPHLHTTNGLPPHLNGTLHKALKMSAPRFAKIVEELQPDLVLYDFLIPWAEKIALSKGVPGVPLLTSGAALFSYFFNFLKRPGHEFPFPAIRLSKREQDKMREMFGTEPTELDFLVPANAGIMLMCTSRVIEAKYLDYCQKLTNVKVVPVGAPFQDPLTEDIYDPELIRWLDTKPEGSVVYVSFGSEYFLSREQMHAVAEGLLKSGVNFIWVARFPKGEEQPLEDVLPPGFLERVGDKGRVLDHLVPQAHILNHKSTGGFISHCGWNSVMESIDFGVPIIAMPMQWDQPINARLLVELGVAVEIRRDEDGRIHADTIAEVLKEVIYGEKGKELREKVAEIAERLRAAREEEMDAAAAELAELCRNRRALK

SEQ ID NO: 460 - protein, 440 aa, synthetic construct
QTLKVMMFPWLALGHVNPFLRIAKQLADRGFEIYLVSTPINLELAKKRIPEKYKNRIHLVEFKLPELPELPPHLHTTNGLPPHLNGTLHKALKAAAPELRKQVEELQPDLVLYDFLIPWAEKVAASLGVPGVPLLTSGAALFSYFFNFLKRPGHEFPFPAIRLSKREQDKMREMFGTEPTELDFLVPANAGIMLMCTSRVIEAPYLDYCSELTNVEVVPVGAPFQDPLTEDIYDPELIAWLDTKPPGSVVYVSFGSEYFLSPEQMRAVAEGLLLSGAYFIWVARFPKGEEQPLEDVLPPGFLERVGDRGRVLDHLVPQAHILNHPSTGGFISHCGWNSVMESIDFGVPIIAMPMQWDQPINARLLVELGVAVEIPRDEDGRIHPEDIARVIRDVIFGPLGEELRARVREIAARLRAEREEEFNEAAERLRQLCLNRRALK

SEQ ID NO: 461 - protein, 440 aa, synthetic construct
QTLQVLMFPWLALGHVNPFLRIAKQLADRGFKIYLVSTKINLELAKKRIPEEYKNRIFLVEYELPELPELPPHLHTTNGLPPHLNGTLHKALKMSAPRFKEIVQKLQPDLVLYDFLIPWAEKVAESLGVPGVPLLTSGAALFSYFFNFLKRPGHEFPFPAIRLSKREQDKMREMFGTEPTELDFLVPANAGIMLMCTSRVIEAKYLDYCQKLTNVKVVPVGAPFQDPLTEDIYDPELIRWLDTKPDNSVVYVSFGSEYFLSREQMEAVARGLLLSGVNFIWVARFPKGEEQPLEDVLPPGFLEAVGDRGRVLDHLVPQAHILNHKSTGGFISHCGWNSVMESIDFGVPIIAMPMQWDQPINARLLVELGVAVEIRRDEDGRIHPEDIAEVLKEVIYGEKGKELRAQVREIAARLRAEREAEMDAAAAELAALCRNRRALK

SEQ ID NO: 462 - protein, 440 aa, synthetic construct
QPPKILMFPWLALGHVNPFLRIAKQLADRGFEIYLVSTAINLELAKKRIPEKYKNKIHLVEYELPELPELPPHLHTTNGLPPHLNGTLHKALKMAQPKFAEIVKELKPDLVLYDFLIPWAEKVAASQGVPGVPLLTSGAALFSYFFNFLKRPGHEFPFPAIRLSKREQDKMREMFGTEPTELDFLVPANAGIMLMCTSRVIEARYLDYCQELTGVRVVPVGAPFQDPLTEDIYDPELIAWLDTKPPGSVVYVSFGSEYFLSREQMEAVARGLLASGQYFIWVARFPKGEEQPLEEVLPPGFLEAIGERGRVLDHLVPQAHILNHPATGGFISHCGWNSVMESIDFGVPIIAMPMQWDQPINARLLVELGVAVEIRRDEDGRISPETIAATIKAVISGPTGKELRARVREIAERLRANRDAEMDAAAAELLELCRNRRALK

SEQ ID NO: 463 - protein, 440 aa, synthetic construct
QPIQVLMFPWLALGHVNPFLRIAKQLADRGFIIYLVSTAINLELAKKRIPEKYKNSIHLVEYELPELPELPPHLHTTNGLPPHLNGTLHKALKMSAPRFREQVENLQPDLVLYDFLIPWAEKVAASLGVPGVPLLTSGAALFSYFFNFLKRPGHEFPFPAIRLSKREQDKMREMFGTEPTELDFLVPANAGIMLMCTSRVIEAKYLDYCQKLTNVKVVPVGAPFQDPLTEDIYDPELIRWLDTKPPGSVVYVSFGSEYFLSREQMEEVARGLLESGVNFIWVARFPKGEEQNLEDVLPEGFLEAVGDRGRVLDHLVPQAHILNHKSTGGFISHCGWNSVMESIDFGVPIIAMPMQWDQPINARLLVELGVAVEIRRDEDGRIHADEIARVLREVIYGELGKKLRENVRKIALKLRAEREKEMDEAAAELRQLCRNRRALK

SEQ ID NO: 464 - protein, 440 aa, synthetic construct
QTLRIAMFPWLGLGHVNPFLRIAKQLADRGFEIYLVSTKINLEMIKKRIPEKYKNKIHLVELKLPELPELPPHYHTTNGLPPHLNKTLHKALKMAAPELRKILENIKPDLVLYDFLVPWAEKVAAELGIPAVPLLTSGAALFSYFFNFLKRPGEEFPFEAIRLSKREQDKMREMFGTEPPEEDFLAPAQAGIMLMCTSEVIEGEYLDYCTELTGVEVVPVGPPFQDPLTEDIDDPELMDWLDTQPERSVVYVSFGSEAFLSREDMEEVARGLLLSGENFIWVARFPKGEEQPLEEVLPPGFLEAIGDRGRVLDHLVPQAHILNHPSTGGFISHCGWNSVMESIDFGVPIIAMPMQWDQPINARLLVSLGVAVEIPRDEDGRVHAEEIARVIREVIHGETGKRLWEQVRRISAELRARREEEMNRAAERLRELCRNRNAYK

SEQ ID NO: 465 - protein, 440 aa, synthetic construct
QPIKILMFPWLALGHVNPFLRIAKQLADRGFIIYLVSTKINLELAEKRIPEKYKDRIHLVEFKLPELPELPEHLHTTNGLPPHLNGTLHKALKEAAPELAKIIEELQPDLVLYDFLIPWAEEVAASHGVPGVPLLTSGAALFSYFFNFLKRPGHEFPFPGIRLSKREQDKMREMFGTEPTELDFLVPANAGVMLMCTSEVIEAPYLKYCEELTGVEVVPVGAPFQDPLTEDIYDPELIAWLDTKPEGSVVYVSFGSEYFLSPEQMEEVALGLELSGVYFIWVARFPKGEEQPLEDVLPPGFLERIGDRGRVLDHLVPQAHILNHKATGGFISHCGWNSVMESIDFGVPIIAMPMQWDQPINARLLVELGVAVEIERDEDGRIHREVIAETLKRVIYGEEGKKLRKNVKEISERLRAEREEVFDRAAERLRELCRNRRALK

SEQ ID NO: 466 - protein, 440 aa, synthetic construct
QTPKILMFPWLALGHVNPFLRIAKQLADRGFEIYLVSTAINLELAKKRIPYKYKDRIHLVEFELPELPELPPHLHTTNGLPPHLNGTLHKALKAAAPRFREIVQELQPDLVLYDFLIPWAEAVAASLGVPGVPLLTSGAALFSYFFNFLKRPGHEFPFPAIRLSKREQDKMREMFGTEPTELDFLVPANAGVMLMCTSRVIEAPYLDYCEKLTNVKVVPVGAPFQDPLTEDIYDPELIAWLDTKPPNSVVYVSFGSEYFLSPEQMREVAEGLLKSGAYFIWVARFPKGEEQPLEEVLPPGFLERAGDRGRVLDHLVPQAHILNHPSTGGFISHCGWNSVMESIDFGVPIIAMPMQWDQPINARLLVELGVAVEIPRDEDGRIHADEIAKVIKDVIFGPTGKELRAKVAEIAAELRARREEEMAEAAEVLRQLCLNRRALK

SEQ ID NO: 467 - protein, 440 aa, synthetic construct
QPTKVLMFPWLALGHVNPFLRIAKQLADRGLHIYLVSTAINLELAKKRIPAKYADKITLVEYALPELPELPPHLHTTNGLPPHLNGTLHKALKMSADRFAEQVNALQPDLVLYDFLIPWAEKVAAAQNVPGVPLLTSGAALFSYFFNFLKRPGHEFPFPAIRLSKREQDKMREMFGTEPTELDFLVPANAGIMLMCTSRVIEAKYLDYCQKLTNVKVVPVGAPFQDPLTEDIYDPELIRWLDNKPEGSVVYVSFGSEYFLSREQMKEVAEGLLLSKVNFIWVARFPKGEEQNLEDVLPDEFLERVGDRGRVLDHLVPQAHILNHKSTGGFISHCGWNSVMESIDFGVPIIAMPMQWDQPINARLLVELGVAVEIRRDEDGRIHRETIAKVLRDVISGDTGIILRRRVRDIALMLRARREEEMDAALGELRALCRNRRALK

SEQ ID NO: 468 - protein, 440 aa, synthetic construct
QPIKVLMFPWLALGHVNPFLRIAKQLADRGFIIYLVSTAINLELAKKRIPEKYKDRIHLVEYKLPELPELPPHLHTTNGLPPHLNGTLHKALKMSAPRFAEQVKELQPDLVLYDFLIPWAEKVAASHGVPGVPLLTSGAALFSYFFNFLKRPGHEFPFPAIRLSKREQDKMREMFGTEPTELDFLVPANAGIMLMCTSRVIEAKYLDYCQKLTNVKVVPVGAPFQDPLTEDIYDPELIRWLDTKPDGSVVYVSFGSEYFLSREQMEEVARGLLESGVNFIWVARFPKGEEQNLEDVLPPGFLEAVGDRGRVLDHLVPQAHILNHKSTGGFISHCGWNSVMESIDFGVPIIAMPMQWDQPINARLLVELGVAVEIRRDEDGRIHAEEIARVLREVIHGPLGEELRAKVREIALKLRAEREKEMNEAAEALRELCRNRRALK

SEQ ID NO: 469 - protein, 440 aa, synthetic construct
QPLKVTMFPWLGLGHVNPFLRIAKQLAKRGFIIYLVSTKINLEMIKKRIPEEYKDKIHLVELKLPELPELPPHYHTTNGLPPHLNKTLHKALKMSAPEFRKILKEIKPDLVLYDFLVPWAEKVAAELDIPAVPLLTSGAALFSYFFNFLKRPGEEFPFEAIRLSKREQDKMREMFGTEPPEEDFLAPAASGVMLMCTSRVIEAEYLAYCTELTGVRVVPVGPPFQDPLTEDIDDPELMAWLDTKPEGSVVYVSFGSEAFLSREDMEEVARGLEASGAYFIWVARFPKGEERPLEDVLPKGFLERVGDRGRVLDHLVPQAHILNHPSTGGFISHCGWNSVMESIDFGVPIIAMPMQWDQPINARLLVRLGVAVEIPRDEDGRVHAADIARVIKDVIFGPLGEELRAKVAEISARLRAEREAEMDAAAAELRALCRNRNAYK

SEQ ID NO: 470 - protein, 440 aa, synthetic construct
QPQKVLMFPWLALGHVNPFLRIAKQLADRGFIIYLVSTAINLELAKKRIPKEYEDRIHLVEYKLPELPELPPHLHTTNGLPPHLNGTLHKALKMSAPEFAKIVKELKPDLVLYDFLIPWAEKIAASHGVPGVPLLTSGAALFSYFFNFLKRPGHEFPFPAIRLSKREQDKMREMFGTEPTELDFLVPANAGIMLMCTSRVIEAKYLDYCQKLTNVKVVPVGAPFQDPLTEDIYDPELIRWLDTKPDNSVVYVSFGSEYFLSREQMEEVALGLLESGVNFIWVARFPKGEEQPLEEVLPEGFLERVGDRGRVLDHLVPQAHILNHKSTGGFISHCGWNSVMESIDFGVPIIAMPMQWDQPINARLLVELGVAVEIRRDEDGRIHRDEIARVLREVIFGPLGEKLRKNVKDIAKKLRAAREEEMDEAAEALRELCRNRRALK

SEQ ID NO: 471 - protein, 440 aa, synthetic construct
QPIKVLMFPWLALGHVNPFLRIAKQLADRGFHIYLVSTAINLELAKKRIPEKYKDRIHLVEFKLPELPELPPHLHTTNGLPPHLNGTLHKALKAAAPELEKIVQELQPDLVLYDFLIPWAEEIAASQGVPGVPLLTSGAALFSYFFNFLKRPGHEFPFPAIRLSKREQDKMREMFGTEPTELDFLVPANAGIMLMCTSRVIEAKYLDYCEELTGVKVVPVGAPFQDPLTEDIYDPELIAWLDTKPPRSVVYVSFGSEYFLSPEQMREVAEGLLRSGVNFIWVARFPKGEEQPLEDVLPPGFLERVGDRGRVLDHLVPQAHILNHPATGGFISHCGWNSVMESIDFGVPIIAMPMQWDQPINARLLVEKGVAVEIRRDEDGRIHADEIARVLREVIHGPLGEELRANVRRISAELRARREEEMAEAAEELRQLCRNRRALK

SEQ ID NO: 472 - protein, 440 aa, synthetic construct
QTQKILMFPWLALGHVNPFLRIAKQLADRGFHIYLVSTAINLELAKKRIPEKYKNKIHLVEYKLPELPELPPHLHTTNGLPPHLNGTLHKALKESAPELSKLVQELQPDLVLYDFLIPWAEKIAESQGVPGVPLLTSGAALFSYFFNFLKRPGHEFPFPAIRLSKREQDKMREMFGTEPTELDFLVPANAGVMLMCTSRVIEGKYLDYCEKLTNVKVVPVGAPFQDPLTEDIYDPELIAWLDTKPDNSVVYVSFGSEYFLSPEQMKAVAEGLLLSGAYFIWVARFPKGEEQPLEDVLPKGFLERVGDRGRVLDHLVPQAHILNHKSTGGFISHCGWNSVMESIDFGVPIIAMPMQWDQPINARLLVELGVAVEIRRDEDGRIHPEEIAEVIKDVIFGPLGEKLRANVKKIAAELRARREEEMDAAAEVLLQLCRNRRALK

SEQ ID NO: 473 - protein, 440 aa, synthetic construct
QPIQVLMFPWLALGHVNPFLRIAKQLADRGFQIYLVSTAINLELAKKRIPPEYANSIHLVEYELPELPELPPHLHTTNGLPPHLNGTLHKALKMAAPRFEEIVRELQPDLVLYDFLIPWAEKVAASLGVPGVPLLTSGAALFSYFFNFLKRPGHEFPFPAIRLSKREQDKMREMFGTEPTELDFLVPANAGLMLMCTSRVIEAKYLDYCQELTGVEVVPVGAPFQDPLTEDIYDPELIRWLDTKPPNSVVYVSFGSEYFLSREQMEEVALGLLKSGANFIWVARFPKGEEQNLEDVLPKGFLEAVGDRGRVLDHLVPQAHILNHPSTGGFISHCGWNSVMESIDFGVPIIAMPMQWDQPINARLLVELGVAVEIRRDEDGRIHADEIARVIKDVIFGPLGEELRARVAEIAARLRAEREAEMDEAAERLRQLCRNRRALK

SEQ ID NO: 474 - protein, 440 aa, synthetic construct
QPIKVAMFPWLGLGHVNPFLRIAKQLADRGFIIYLVSTKINLEMIKKRIPEKYKDKIHLVELKLPELPELPPHYHTTNGLPPHLNKTLHKALKAAAPELRKILEEIKPDLVLYDFLVPWAEKVARELGIPAVPLLTSGAALFSYFFNFLKRPGEEFPFEAIRLSKREQDKMREMFGTEPPEEDFLAPAQAGIMLMCTSRVIEAEYLDYCTELTGVEVVPVGPPFQDPLTEDIDDPELMAWLDTKPENSVVYVSFGSEAFLSREDMEEVARGLLLSGANFIWVARFPKGEEQPLEEVLPPGFLEAIGDRGRVLDHLVPQAHILNHPSTGGFISHCGWNSVMESIDFGVPIIAMPMQWDQPINARLLVSLGVAVEIPRDEDGRVHAEDIARVIRDMIFGETGKKLRAKVKEISAKLRATRQEEMDAAAERLIQLCRNRNAYK

SEQ ID NO: 475 - protein, 440 aa, synthetic construct
QPLKITMFPWLGLGHVNPFLRIAKQLADRGFKIYLVSTAINLEMIKKRIPEEYKDKIHLVELRLPELPELPPHYHTTNGLPPHLNKTLHKALKAAAPQFAEILKEIQPDLVLYDFLVPWAEKVAAEQGIPAVPLLTSGAALFSYFFNFLKRPGEEFPFEAIRLSKREQDKMREMFGTEPPEEDFLAPAQAGIMLMCTSEVIEGEYLKYCTELTGVEVVPVGPPFQDPLTEDIDDPELMAWLDTKPENSVVYVSFGSEAFLSREDMEEVAWGLLLSGAYFIWVARFPKGEEQPLEDVLPKGFLEKVGDKGRVLDHLVPQAHILNHPATGGFISHCGWNSVMESIDFGVPIIAMPMQWDQPINARLLVELGVAVEIPRDEDGRVHREDIARVIKDVIFGPTGEELRKKVKDISAKLRAEREAEMARAAERLRQLCRNRNAYK

SEQ ID NO: 476 - protein, 440 aa, synthetic construct
QPLKIAMFPWLGLGHVNPFLRIAKQLAKRGFKIYLVSTKINLEMIKKRIPEEYKDKIHLVELRLPELPELPPHYHTTNGLPPHLNKTLHKALKAAAPEFEKILKNIKPDLVLYDFLVPWAEKVAAKLGIPAVPLLTSGAALFSYFFNFLKRPGEEFPFEAIRLSKREQDKMREMFGTEPPEEDFLAPAQAGIMLMCTSRVIEGKYLDYCTELTGVEVVPVGPPFQDPLTEDIDDPELMAWLDTKPERSVVYVSFGSEAFLSREDMEAVARGLELSGQYFIWVARFPKGEEQRLEDVLPEGFLERIGDRGRVLDHLVPQAHILNHPATGGFISHCGWNSVMESIDFGVPIIAMPMQWDQPINARLLVDLGVAVEIPRDEDGRVHPEDIARVIREVISGPLGEILRKQVEDISARLRAEREREMDEAAERLRQLCRNRNAYK

SEQ ID NO: 477 - protein, 440 aa, synthetic construct
QPLHVVMFPWLGLGHVNPFLRIAKQLADKGFTVYLVSTAINLEMIKKRIPEKYSDSIHLVELRLEELPELPPHYHTTNGLPPHLNKTLHKALKMSAPKFEKILADVKPDLVLYDFLVPWAEKVSLEQDIPAVPLLTSGAALFSYFFNFLKRPGEEFPFEAIRLSKREQDKMREMFGTEPPEEDFLAPATIGVMLMCTSQVIEAPYLEYCTELTNVKVVPVGPPFQDPLTEDIDDPELMAWLNTQPEGSVVYVSFGSEAFLSREDMFEVAEGLLLAGVYFIWVARFPKGEEGPLEDALPEGFLEKVKGRGRVLDHLVPQAHILNHPATGGFISHCGWNSVMESIDFGVPIIAMPMQWDQPINARLLVELGVAVEIPRDEDGRVHRDEIARVIRRVIFDDEASTLRMRVLEISKMLRAEREENMNRAAQELRNICRNRNAYK

SEQ ID NO: 478 - protein, 440 aa, synthetic construct
QTPQVLMFPWLALGHVNPFLRIAKQLADRGFKIYLVSTKINLELAKKRIPAKYANSIHLVEYELPELPELPPHLHTTNGLPPHLNGTLHKALKMSAPKFAEIVKNLQPDLVLYDFLIPWAEKVAASHGVPGVPLLTSGAALFSYFFNFLKRPGHEFPFPEIRLSKREQDKMREMFGTEPTELDFLVPANAGVMLMCTSRVIEAKYLDYCEELTGVKVVPVGAPFQDPLTEDIYDPELIAWLDTKPPNSVVYVSFGSEYFLSPEQMEAVANGLLKSGANFIWVARFPKGEEQPLEDVLPPGFLEAAGDRGRVLDHLVPQAHILNHPSTGGFISHCGWNSVMESIDFGVPIIAMPMQWDQPINARLLVSLGVAVEIERDEDGRIHPDVIAQTIKDVIFGPTGKELRANVRKIAERLRAEREAEMNEAAEELLQLCRNRRALK

SEQ ID NO: 479 - protein, 440 aa, synthetic construct
QPLKVLMFPWLALGHVNPFLRIAKQLADRGFEIYLVSTKINLELAKKRIPEKYKDKIHLVEYELPELPELPPHLHTTNGLPPHLNGTLHKALKMSAPRFAEQVKNLQPDLVLYDFLIPWAEKVAASHGVPGVPLLTSGAALFSYFFNFLKRPGHEFPFPAIRLSKREQDKMREMFGTEPTELDFLVPANAGIMLMCTSRVIEAKYLDYCQKLTNVKVVPVGAPFQDPLTEDIYDPELIRWLDTKPDNSVVYVSFGSEYFLSREQMEEVARGLELSGVNFIWVARFPKGEEQPLEEVLPPGFLERVGDRGRVLDHLVPQAHILNHKSTGGFISHCGWNSVMESIDFGVPIIAMPMQWDQPINARLLVELGVAVEIRRDEDGRIHAEEIAKVLKEVIYGEKGKELRKKVKDIAEKLRASREAEMDEAAAELAQLCRNRRALK

SEQ ID NO: 480 - protein, 440 aa, synthetic construct
QPLKVAMFPWLGLGHVNPFLRIAKQLADRGFIIYLVSTKINLEMIKKRIPEEYKNSIHLVELKLPELPELPPHYHTTNGLPPHLNKTLHKALKAAAPNLEKILKEIKPDLVLYDFLVPWAEKVALKLGIPAVPLLTSGAALFSYFFNFLKRPGEEFPFEAIRLSKREQDKMREMFGTEPPEEDFLAPAQAGIMLMCTSRVIEGEYLDYCTELTGVKVVPVGPPFQDPLTEDIDDPELMAWLDTQPERSVVYVSFGSEAFLSREDMEAVAEGLLASGVNFIWVARFPKGEEQPLEDVLPPGFLERIGDRGRVLDHLVPQAHILNHPATGGFISHCGWNSVMESIDFGVPIIAMPMQWDQPINARLLVSLGVAVEIPRDEDGRVHPADIARVLREMIHGETGEILRARVAEISARLRATREEEMDEAAEALRELCRNRNAYK

SEQ ID NO: 481 - protein, 440 aa, synthetic construct
QTPKVLMFPWLALGHVNPFLRIAKQLADRGFVIYLVSTPINLELAKKRIPEKYKNSIHLVEYKLPELPELPPHLHTTNGLPPHLNGTLHKALKMSAPEFKKQVEELKPDLVLYDFLIPWAEKIAESLGVPGVPLLTSGAALFSYFFNFLKRPGHEFPFPAIRLSKREQDKMREMFGTEPTELDFLVPANAGIMLMCTSRVIEAKYLDYCQKLTNVKVVPVGAPFQDPLTEDIYDPELIRWLDTKPDGSVVYVSFGSEYFLSREQMHAVAFGLLLSGQNFIWVARFPKGEEQPLEDVLPPGFLERVGDRGRVLDHLVPQAHILNHKSTGGFISHCGWNSVMESIDFGVPIIAMPMQWDQPINARLLVELGVAVEIRRDEDGRIHPEDIAQVLKDVISGELGKELRAKVKEIAAQLRAEREAEMNEAAEALRELCLNRRALK

SEQ ID NO: 482 - protein, 440 aa, synthetic construct
QELRVTMFPWLGLGHVNPFLRIAKQLVKRGLKISLVSTKINLEMIKKRIPREYGDSIKLVELELPELPELPPHYHTTNGLPPHLNKTLHKALKMSAEQFRKFLEEIQPDLVLYDFLVPWAEDVALELEIPAVPLLTSGAALFSYFFNFLKRPGEEFPFEAIRLSKREQDKMREMFGTEPPEEDFLAPAQADIMLMCTSRVIEGKYLEYCTELTNVKVVPVGPPFQDPLTEDIDDPELMDWLDTQLENSVVYVSFGSEAFLSREDMKEVCEGLLKSGVNFIWVARFPKGEEQPLENVLPEGFLEKIGDRGRVLDHLVPQAHILNHPATGGFISHCGWNSVMESIDFGVPIIAMPMQWDQPINARLLVELGVAVEIERDEDGRVTAKNIARVIKDVIGGEGGKGLRAKVKEISAKLREVREEEMQAAYEDLINLCRNRNAYK

SEQ ID NO: 483 - protein, 440 aa, synthetic construct
QTPRVLMFPWLALGHVNPFLRIAKQLADRGFEIYLVSTAINLELAKKRIPEKYSNRIHLVEFELPELPELPPHLHTTNGLPPHLNGTLHKALKAAAPRLRALVEELQPDLVLYDFLIPWAEAVAASLGVPGVPLLTSGAALFSYFFNFLKRPGHEFPFPAIRLSKREQDKMREMFGTEPTELDFLVPANAGVMLMCTSRVIEGPYLDYCSELTNVKVVPVGAPFQDPLTEDIYDPELIAWLDTKPPNSVVYVSFGSEYFLSREQMEEVALGLEKSGVYFIWVARFPKGEEQPLEDVLPPGFLERVGDRGRVLDHLVPQAHILNHPSTGGFISHCGWNSVMESIDFGVPIIAMPMQWDQPINARLLVELGVAVEIPRDEDGRIHADDIARVLKEVIFGPLGEKLRAQVRKIAAALRAEREAEFDAAAEVLLQLCRNRRALK

SEQ ID NO: 484 - protein, 440 aa, synthetic construct
QPLKVAMFPWLGLGHVNPFLRIAKQLAKRGFEIYLVSTKINLEMIKKRIPEEYKNSIHLVELKLPELPELPPHYHTTNGLPPHLNKTLHKALKAAAPNLEKILKEIQPDLVLYDFLVPWAEKVALKLGIPAVPLLTSGAALFSYFFNFLKRPGEEFPFEAIRLSKREQDKMREMFGTEPPEEDFLAPAQAGIMLMCTSRVIEGEYLDYCTELTGVKVVPVGPPFQDPLTEDIDDPELMAWLDTQPPRSVVYVSFGSEAFLSREDMRAVAEGLLASGQYFIWVARFPKGEEQPLEEVLPPGFLERVGDRGRVLDHLVPQAHILNHPATGGFISHCGWNSVMESIDFGVPIIAMPMQWDQPINARLLVSLGVAVEIPRDEDGRVHPADIARVIREMISGPLGEILHAKVREISAQLRAAREAEMDAAAAALRELCRNRNAYK

SEQ ID NO: 485 - protein, 440 aa, synthetic construct
QTEKILMFPWLALGHVNPFLRIAKQLADRGFVIYLVSTKINLELAKKRIPYKYSNRIHLVEYELPELPELPPHLHTTNGLPPHLNGTLHKALKMSAPRFEEIVKELKPDLVLYDFLIPWAEKVAESLGVPGVPLLTSGAALFSYFFNFLKRPGHEFPFPAIRLSKREQDKMREMFGTEPTELDFLVPANAGIMLMCTSRVIEAPYLDYCQKLTNVEVVPVGAPFQDPLTEDIYDPELIAWLDTKPPNSVVYVSFGSEYFLSREQMRAVAEGLLLSGAYFIWVARFPKGEEQPLEDVLPEGFLERVGDRGRVLDHLVPQAHILNHPSTGGFISHCGWNSVMESIDFGVPIIAMPMQWDQPINARLLVELGVAVEIPRDEDGRIHPEEIARVIKEVIFGPLGEELRARVREIAARLRAEREEEMAEAAERLRQLCRNRRALK

SEQ ID NO: 486 - protein, 440 aa, synthetic construct
QPLRILMFPWLALGHVNPFLRIAKQLADRGFHVYLVSTAINLELAAKRIPPEYADRIHLVEFELPELPELPPHLHTTNGLPPHLNGTLHKALKAAAPRLAKIVQELKPDLVLYDFLIPWAEKVAASHGVPGVPLLTSGAALFSYFFNFLKRPGHEFPFPGIRLSKREQDKMREMFGTEPTELDFLVPANAGLMLMCTSREIEARYLDYCQELTGVRVVPVGAPFQDPLTEDIYDPELIAWLDTKPPNSVVYVSFGSEYFLSPEQMRAVAEGLLRSGQYFIWVARFPKGEEQNLEDVLPAGFLEAVGDRGRVLDHLVPQAHILNHPATGGFISHCGWNSVMESIDFGVPIIAMPMQWDQPINARLLVEKGVAVEIPRDEDGRIHPDAIAAVIKEVISGPLGEKLRANVKALSEKLRAARDEEFDRAAAELAALCRNRRALK

SEQ ID NO: 487 - protein, 440 aa, synthetic construct
QPLKVAMFPWLGLGHVNPFLRIAKQLADRGFIVYLVSTAINLEMIKKRIPEKYSDKIHLVELRLPELPELPPHYHTTNGLPPHLNKTLHKALKMSAPEFRKILEEIQPDLVLYDFLVPWAEDVALEQDIPAVPLLTSGAALFSYFFNFLKRPGEEFPFEAIRLSKREQDKMREMFGTEPPEEDFLAPAKSGIMLMCTSEVIEAEYLKYCTELTNVKVVPVGPPFQDPLTEDIDDPELMAWLDTKPPGSVVYVSFGSEAFLSREDMEEVARGLLLSGAYFIWVARFPKGEERPLEDVLPEGFLEAVGDRGRVLDHLVPQAHILNHPATGGFISHCGWNSVMESIDFGVPIIAMPMQWDQPINARLLVKLGVAVEIPRDEDGRVHAEEIARVIREVIFGETGKELREKVAEISKELRARRQEEMDRAAAELKKLCRNRNAYK

SEQ ID NO: 488 - protein, 440 aa, synthetic construct
QPQKVLMFPWLALGHVNPFLRIAKQLADRGFHIYLVSTAINLELAKKRIPEKYKDRIHLVEYKLPELPELPPHLHTTNGLPPHLNGTLHKALKMSAPEFRKIVEELKPDLVLYDFLIPWAEKIAASLGVPGVPLLTSGAALFSYFFNFLKRPGHEFPFPAIRLSKREQDKMREMFGTEPTELDFLVPANAGIMLMCTSRVIEAKYLDYCQKLTNVKVVPVGAPFQDPLTEDIYDPELIRWLDTQPEGSVVYVSFGSEYFLSREQMREVAEGLLLSGVNFIWVARFPKGEEQPLEEVLPEGFLEAVGDRGRVLDHLVPQAHILNHKSTGGFISHCGWNSVMESIDFGVPIIAMPMQWDQPINARLLVELGVAVEIRRDEDGRIHRETIAEVLREVIFGELGKKLRANVKDIAAKLRAARQAEMDEAAAALAELCRNRRALK

SEQ ID NO: 489 - protein, 440 aa, synthetic construct
QPQRILMFPWLALGHVNPFLRIAKQLADRGFEIYLVSTRINLELAAKRIPERYADRIHLVEFELPELPELPPHLHTTNGLPPHLNGTLHKALKAAAPRLAEIVRRLQPDLVLYDFLIPWAEAVAAAHGVPGVPLLTSGAALFSYFFNFLKRPGHEFPFPEIRLSKREQDKMREMFGTEPTELDFLVPANAGVMLMCTSRVIEKEYLDYCEKLTNVKVVPVGAPFQDPLTEDIYDPELIRWLDTKPPNSVVYVSFGSEYFLSPEQMREVAEGLLKSGVYFIWVARFPKGEEQPLEDVLPKGFLEAIGDRGRVLDHLVPQAHILNHPSTGGFISHCGWNSVMESIDFGVPIIAMPMQWDQPINARLLVKKGVAVEIRRDEDGRIHAEEIARVLKEVIYGEKGKILRENVKKISKELRAEREKVMDEAAEVLAELCRNRRALK

SEQ ID NO: 490 - protein, 440 aa, synthetic construct
QPLQILMFPWLALGHVNPFLRIAKQLADRGFVIYLVSTAINLELAKKRIPAEYADRIHLVEYKLPELPELPPHLHTTNGLPPHLNGTLHKALKMSAPEFEKIVRELQPDLVLYDFLIPWAEKIALSLGVPGVPLLTSGAALFSYFFNFLKRPGHEFPFPAIRLSKREQDKMREMFGTEPTELDFLVPANAGIMLMCTSEVIEAPYLAYCQELTGVEVVPVGAPFQDPLTEDIYDPELIAWLDTKPPNSVVYVSFGSEYFLSREQMEAVAFGLLKSGAYFIWVARFPKGEEQPLEDVLPPGFLEAIGDKGRVLDHLVPQAHILNHPATGGFISHCGWNSVMESIDFGVPIIAMPMQWDQPINARLLVELGVAVEIRRDEDGRIDSDVIAQTIQEVIFGEKGEILRKKVRDIAARLRAARDAEMDRAAAALAALCRNRRALK

SEQ ID NO: 491 - protein, 440 aa, synthetic construct
QPLKILMFPWLGLGHVNPFLRIAKQLADRGFEIYLVSTKINLEMIKKRIPEEYKNRIHLVELKLPELPELPEHYHTTNGLPPHLNKTLHKALKMSAPNFEKILKEIQPDLVLYDFLVPWAEDVALKLGIPAVPLLTSGAALFSYFFNFLKRPGEEFPFEAIRLSKREQDKMREMFGTEPPEEDFLAPAKSGVMLMCTSPVIEAPYLAYCTELTGVKVVPVGPPFQDPLTEDIDDPELMAWLDTKPPGSVVYVSFGSEAFLSREDMREVAEGLLESGVYFIWVARFPKGEERPLEEVLPPGFLERVGDRGRVLDHLVPQAHILNHPATGGFISHCGWNSVMESIDFGVPIIAMPMQWDQPINARLLVELGVAVEIPRDEDGRVHRAEIARVLKEVIFGPLGEELRAKVAEISAALRARRDAEMDAAAEVLRQLCRNRNAYK

SEQ ID NO: 492 - protein, 440 aa, synthetic construct
QTPQVLMFPWLALGHVNPFLRIAKQLADRGFKIYLVSTAINLELAKKRIPEKYKDKIHLVEYELPELPELPPHLHTTNGLPPHLNGTLHKALKMSAPRFAKIVENLKPDLVLYDFLIPWAEKVAASQGVPGVPLLTSGAALFSYFFNFLKRPGHEFPFPEIRLSKREQDKMREMFGTEPTELDFLVPANAGIMLMCTSRVIEAKYLAYCQELTGVEVVPVGAPFQDPLTEDIYDPELIAWLDTKPPNSVVYVSFGSEYFLSPEQMRAVAEGLLRSGAYFIWVARFPKGEEQPLEDVLPAGFLERAGDRGRVLDHLVPQAHILNHPSTGGFISHCGWNSVMESIDFGVPIIAMPMQWDQPINARLLVSLGVAVEIRRDEDGRIHPDTIAQVIRDVIFGPTGEELRAKVREIAARLRAARDAEMDAAAERLLQLCRNRRALK

SEQ ID NO: 493 - protein, 440 aa, synthetic construct
QPIKVLMFPWLALGHVNPFLRIAKQLADRGFEIYLVSTKINLELAKKRIPEKYKNRIHLVEYELPELPELPPHLHTTNGLPPHLNGTLHKALKMAAPRFDEIVKNLKPDLVLYDFLIPWAEKVALSHGVPGVPLLTSGAALFSYFFNFLKRPGHEFPFPAIRLSKREQDKMREMFGTEPTELDFLVPANAGIMLMCTSEVIEAPYLAYCQELTGVEVVPVGAPFQDPLTEDIYDPELIAWLDTKPPGSVVYVSFGSEYFLSREQMEEVALGLLKSGQYFIWVARFPKGEEQNLEDVLPEGFLEAIGDRGRVLDHLVPQAHILNHPATGGFISHCGWNSVMESIDFGVPIIAMPMQWDQPINARLLVELGVAVEIRRDEDGRIHADTIAETIQAVINGETGKTLRAQVAAIAAQLRASREAEMDRAAARLAELCRNRRALK

SEQ ID NO: 494 - protein, 440 aa, synthetic construct
QSPSITMFPWLGLGHVNPFLRIAKQLADRGFKIYLVSTEINLNMIKKRIPEHYKNVIHLVELKLPELPELPPHYHTTNGLPPHLNKTLHKALKLSAPNFVRILQTIEPNLLLYDFLVPWAPGVASELGIPAVPLLTSGAALFSYFFNFLKRPGEEFPFEAIRLSKREQDKMREMFGTEPPEEDFLAPAQAGIMLMCTSRVIEGEYLDYCEELTGVEVVPVGPPFQDPLTEDIDDMGLMEWLDTKGPLSVVYVSFGSEAFLSKEDMRELAEGLLLSGVDFIWVARFPKGEEQSLEDVLPEGYLERVGDRGRVLDHLVPQAHILNHPATGGFISHCGWNSVMESIDFGVPIIAMPMQWDQPINARLLKSLGVAVEIPRDEDGRVHREEIARVLRQVIFGPEGERLRAQTRQISENLRARREEEFDEAAARLIQLCRNRNAYK

SEQ ID NO: 495 - protein, 440 aa, synthetic construct
QPLRILMFPWLALGHVNPFLRIAKQLAARGFEIYLVSTPINLELAKKRIPPEYADRIHLVEFPLPELPELPPHLHTTNGLPPHLNGTLHKALKASAPELAKIVQELKPDLVLYDFLIPWAEKVAASQGVPGVPLLTSGAALFSYFFNFLKRPGHEFPFPEIRLSKREQDKMREMFGTEPTELDFLVPANAGLMLMCTSRVIEAEYLAYCQELTGVRVVPVGAPFQDPLTEDIYDPELIAWLDTKPPRSVVYVSFGSEYFLSPEQMEAVAQGLLASGQYFIWVARFPKGEEQNLEDVLPPGFLEAVGDRGRVLDHLVPQAHILNHPATGGFISHCGWNSVMESIDFGVPIIAMPMQWDQPINARLLVKLGVAVEIERDEDGRIHADTIAATIKAVISGPLGEKLRANVAAISKALRAAREAEFDAAAAELAALCRNRRALK

SEQ ID NO: 496 - protein, 440 aa, synthetic construct
QTPKVLMFPWLALGHVNPFLRIAKQLADRGFEIYLVSTAINLELAKKRIPEKYKDRIHLVEYALPELPELPPHLHTTNGLPPHLNGTLHKALKMSAPRFDEQVKELQPDLVLYDFLIPWAEKVALAHGVPGVPLLTSGAALFSYFFNFLKRPGHEFPFPAIRLSKREQDKMREMFGTEPTELDFLVPANAGIMLMCTSRVIEAKYLDYCQKLTNVKVVPVGAPFQDPLTEDIYDPELIRWLDTKPENSVVYVSFGSEYFLSREQMEEVARGLLESGVNFIWVARFPKGEEQNLEDVLPEGFLEAVGDRGRVLDHLVPQAHILNHKSTGGFISHCGWNSVMESIDFGVPIIAMPMQWDQPINARLLVELGVAVEIRRDEDGRIHADDIARVLKEVIYGELGKKLRENVRRIALRLRARREEEMDEAAAALRELCLNRRALK

SEQ ID NO: 497 - protein, 440 aa, synthetic construct
QPLKILMFPWLGLGHVNPFLRIAKQLADRGFEIYLVSTKINLEMIKKRIPEEYKNKIHLVELKLPELPELPPHYHTTNGLPPHLNKTLHKALKMSAPNFRKILEEIKPDLVLYDFLVPWAEDVAAELGIPAVPLLTSGAALFSYFFNFLKRPGEEFPFEAIRLSKREQDKMREMFGTEPPEEDFLAPARSGIMLMCTSPVIEAEYLAYCTELTGVEVVPVGPPFQDPLTEDIDDPELMAWLDTKPEGSVVYVSFGSEAFLSREDMREVAEGLLLSGVYFIWVARFPKGEERPLEEVLPPGFLEAVGDRGRVLDHLVPQAHILNHPSTGGFISHCGWNSVMESIDFGVPIIAMPMQWDQPINARLLVRLGVAVEIPRDEDGRVHRAEIARVLKEVIFGPLGEELRAKVAEISAALRAERDAVMDRAAERLRQLCRNRNAYK

SEQ ID NO: 498 - protein, 440 aa, synthetic construct
QRLKITMFPWLGLGHVNPFLRIAKQLADRGFEIYLVSTKINLEMIKKRITEGYKPRIHLVELKLPELPELPPHYHTTNGLPPHLNKTLHKALKAASPEFAKILQAIRPDLLLYDFLVPWAERVALEQGIPAVPLLTSGAALFSYFFNFLKRPGEEFPFEAIRLSKREQDKMREMFGTEPPEEDFLAPAQAGIMLMCTSREIEEKYLDYCSQLTKVEVVPVGPPFQDPLTEDIDDPELMAWLDTQPKGSVVYVSFGSEAFLSPEDMEEIARGLELSKVNFIWVARFPKGEEQPLEGVLPPGFLERVGDRGRVLDHLVPQAHILNHRSTGGFISHCGWNSVMESIDFGVPIIAMPMQWDQPINARLLKEVGVAVEIERDEDGRVHAEEMCRVLREMIYGPIGEGLRKKAKDLSKKLRTRREEEINEAAERLIQLCRNRNAYK

SEQ ID NO: 499 - protein, 440 aa, synthetic construct
QTPQVLMFPWLALGHVNPFLRIAKQLADRGFQIYLVSTAINLELAKKRIPPKYANRIHLVEYELPELPELPPHLHTTNGLPPHLNGTLHKALKMSAPRFAEIVQNLQPDLVLYDFLIPWAEKVAASQGVPGVPLLTSGAALFSYFFNFLKRPGHEFPFPAIRLSKREQDKMREMFGTEPTELDFLVPANAGLMLMCTSRVIEAKYLDYCEELTGVEVVPVGAPFQDPLTEDIYDPELIAWLDTKPPNSVVYVSFGSEYFLSPEQMREVAEGLLRSGQYFIWVARFPKGEEQPLEDVLPPGFLERVGDRGRVLDHLVPQAHILNHPSTGGFISHCGWNSVMESIDFGVPIIAMPMQWDQPINARLLVEKGVAVEIPRDEDGRIHADTIAQVIKDVISGPTGEKLRAQVAAIAKELRAARQAEMDAAAERLLQLCRNRRALK

SEQ ID NO: 500 - protein, 440 aa, synthetic construct
QTPKILMFPWLALGHVNPFLRIAKQLADRGFHIYLVSTAINLELAKKRIPEKYKDKITLVEYELPELPELPPHLHTTNGLPPHLNGTLHKALKMSAPRFDEIVKELQPDLVLYDFLIPWAEKIAEKHGVPGVPLLTSGAALFSYFFNFLKRPGHEFPFPAIRLSKREQDKMREMFGTEPTELDFLVPANAGIMLMCTSEVIEAPYLEYCQKLTNVEVVPVGAPFQDPLTEDIYDPELIAWLDTKPPGSVVYVSFGSEYFLSREQMHEVAEGLLESGVNFIWVARFPKGEEQPLEEVLPEGFLERIGDRGRVLDHLVPQAHILNHPATGGFISHCGWNSVMESIDFGVPIIAMPMQWDQPINARLLVELGVAVEIRRDEDGRIHREWIAETIREVIYGPTGETLRAQVAKIAAQLRAAREAEMDRAAERLLQLCLNRRALK

SEQ ID NO: 501 - protein, 440 aa, synthetic construct
QKLKITMFPWLGLGHVNPFLRIAKQLADRGFEIYLVSTKINLEMIKKRIPEKYKNSIHLVELELPELPELPEHYHTTNGLPPHLNKTLHKALKMSAPNFSKILEEIKPDLVLYDFLVPWAEKVALELDIPAVPLLTSGAALFSYFFNFLKRPGEEFPFEAIRLSKREQDKMREMFGTEPPEEDFLAPAPSGIMLMCTSRVIEARYLAYCTELTGVEVVPVGPPFQDPLTEDIDDPELMAWLDTKPEHSVVYVSFGSEAFLSREDMRAVAEGLLLSGQYFIWVARFPKGEERPLEEVLPPGFLEAAGERARVLDHLVPQAHILNHPSTGGFISHCGWNSVMESIDFGVPIIAMPMQWDQPINARLLVELGVAVEIPRDEDGRVHPEEIARVIREVISGPLGEELRARVREISARLRAEREAEMDAAAQRLIELCRNRNAYK

SEQ ID NO: 502 - protein, 440 aa, synthetic construct
QRLRILMFPWLGLGHVNPFLRIAKQLADRGFEIYLVSTKINLEMIKKRIPEEYKDSIHLVELKLPELPELPEHYHTTNGLPPHLNKTLHKALKMSAPNFRKILEEIKPDLVLYDFLVPWAEKVAAELDIPAVPLLTSGAALFSYFFNFLKRPGEEFPFEAIRLSKREQDKMREMFGTEPPEEDFLAPAAAGVMLMCTSEVIEGKYLEYCTELTGVKVVPVGPPFQDPLTEDIDDPELMAWLDTQPEGSVVYVSFGSEAFLSREDMREVAFGLLASGQNFIWVARFPKGEEVPLEEVLPEGFLERAGDRARVLDHLVPQAHILNHPSTGGFISHCGWNSVMESIDFGVPIIAMPMQWDQPINARLLVELGVAVEIPRDEDGRVHADDIAAVIRAVISGETGKRLRARVRDISARLRARREEEMAAAAAVLRELCRNRNAYK

SEQ ID NO: 503 - protein, 440 aa, synthetic construct
QPPSFTMFPWLGLGHVNPFLRIAKQLSSRGVEVTLVSTPINLEMIKKRIPDEYCDSIHLVTLQLPELPELPPHYHTTNGLPPHLNKTLHKALKMSAPEFKKILKEVSADLVLYDFLVPWAEKVANDLNIPAVPLLTSGAALFSYFFNFLKRPGEEFPFEAIRLSKREQDKMREMFGTEPPEEDFLAPAQAGIMLMCTSEDIEAKYLDYCTELTNVKVVPVGPPFQDPLTEDIDDPELMDWLDSKPEGSVVYVSFGSEAFLSREDMEAVAEALLKSQVKFIWVARFPKGEEQPLEIVLPEGFLEKVGDKGRVLDHLVPQAHILNHPSTGGFISHCGWNSVMESIDFGVPIIAMPMQWDQPINARLLVELGVAVEIGRDEDGRVHSDEIARTIKNVIYGETGKELREKVKEISEKLRKHREEEMNAAYENLISLCRNRNAYK

SEQ ID NO: 504 - protein, 440 aa, synthetic construct
QTFKVLMFPWLALGHVNPFLRIAKQLADRNVNIYLVSTAINLELAKKRIPEKYADKIRLVEYTLPELPELPPHLHTTNGLPPHLNGTLHKALKMSAPEFAKQLEELQPDLVLYDFLIPWAEKVAASLGIPGVPLLTSGAALFSYFFNFLKRPGHEFPFPAIRLSKREQDKMREMFGTEPTELDFLVPANAGIMLMCTSRVIEAKYLDYCQKLTNVKVVPVGAPFQDPLTEDIYDPELIRWLDAKEDASVVYVSFGSEYFLSREQMEEVASGLEKSGVNFIWVARFPKGEEQNLEDVLPVGFLERVGERGRVLDHLVPQAHILNHKSTGGFISHCGWNSVMESIDFGVPIIAMPMQWDQPINARLLVELGVAVEIRRDEDGRIHSGDIAEVLREVIKGPLGDELRKRVREIALKLRSEREEEMGWARDELAKLCTNRRALK

SEQ ID NO: 505 - protein, 440 aa, synthetic construct
QPPQVLMFPWLALGHVNPFLRIAKQLADRGFIIYLVSTKINLELAKKRIPEEYKDKIHLVEYKLPELPELPPHLHTTNGLPPHLNGTLHKALKMSAPEFRKIVEELQPDLVLYDFLIPWAEKIALSLGVPGVPLLTSGAALFSYFFNFLKRPGHEFPFPAIRLSKREQDKMREMFGTEPTELDFLVPANAGIMLMCTSRVIEAKYLDYCQKLTNVKVVPVGAPFQDPLTEDIYDPELIRWLDTQPEGSVVYVSFGSEYFLSREQMEEVALGLLESGVNFIWVARFPKGEEQPLEDVLPEGFLERVGDRGRVLDHLVPQAHILNHKSTGGFISHCGWNSVMESIDFGVPIIAMPMQWDQPINARLLVELGVAVEIRRDEDGRIHREEIARVLKEVISGETGKILRENVRKIAEKLRAEREKEMDEAAEELRKLCRNRRALK

SEQ ID NO: 506 - protein, 440 aa, synthetic construct
QPQRILMFPWLALGHVNPFLRIAKQLAARGFEIYLVSTAINLELAKKRIPPEYANSIHLVEFELPELPELPPHLHTTNGLPPHLNGTLHKALKASAPRLRKIVEELQPDLVLYDFLIPWAEAVAASLGVPGVPLLTSGAALFSYFFNFLKRPGHEFPFPGIRLSKREQDKMREMFGTEPTELDFLVPANAGLMLMCTSRVIEAEYLAYCEKLTNVKVVPVGAPFQDPLTEDIYDPELIRWLDTKPPNSVVYVSFGSEYFLSPEQMREVAEGLLKSGVNFIWVARFPKGEEQPLEDVLPKGFLEAAGDRGRVLDHLVPQAHILNHPSTGGFISHCGWNSVMESIDFGVPIIAMPMQWDQPINARLLVEKGVAVEIRRDEDGRIHADTIAQVLKDVIYGPTGEILRANVRRISKELRARREEEMDEAAERLAQLCRNRRALK

SEQ ID NO: 507 - protein, 440 aa, synthetic construct
QPLKVAMFPWLGLGHVNPFLRIAKQLAKRGFKIYLVSTKINLEMIKKRIPEEYKDSIHLVELELPELPELPPHYHTTNGLPPHLNKTLHKALKAAAPNLRKILEEIQPDLVLYDFLVPWAEKVAQELGIPAVPLLTSGAALFSYFFNFLKRPGEEFPFEAIRLSKREQDKMREMFGTEPPEEDFLAPAQAGVMLMCTSRVIEGEYLDYCTELTGVKVVPVGPPFQDPLTEDIDDPELMAWLDTKPENSVVYVSFGSEAFLSREDMREVAEGLLLSGAYFIWVARFPKGEEQPLESVLPEGFLERIGDRGRVLDHLVPQAHILNHPATGGFISHCGWNSVMESIDFGVPIIAMPMQWDQPINARLLVSLGVAVEIPRDEDGRVHAEDIARVIREVIFGETGKELRAKVKEISARLRAEREEEMAEAAETLRQLCRNRNAYK

SEQ ID NO: 508 - protein, 440 aa, synthetic construct
QPLKIAMFPWLGLGHVNPFLRIAKQLADRGFIIYLVSTKINLEMIKKRIPEKYKDKIHLVELRLPELPELPPHYHTTNGLPPHLNKTLHKALKAAAPEFREILKNIQPDLVLYDFLVPWAEKVAAELGIPAVPLLTSGAALFSYFFNFLKRPGEEFPFEAIRLSKREQDKMREMFGTEPPEEDFLAPAQAGIMLMCTSEVIEGKYLAYCTELTGVEVVPVGPPFQDPLTEDIDDPELMAWLDTKPPRSVVYVSFGSEAFLSREDMEAVARGLELSGVDFIWVARFPKGEEQRLEDVLPEGFLERVGDRGRVLDHLVPQAHILNHPATGGFISHCGWNSVMESIDFGVPIIAMPMQWDQPINARLLVSLGVAVEIPRDEDGRVHPEDIARVLREMIYGETGEILHAKVADISAKLRARREEEMEKAAEALRQLCRNRNAYK

SEQ ID NO: 509 - protein, 440 aa, synthetic construct
QPLKITMFPWLGLGHVNPFLRIAKQLADRGFKIYLVSTKINLEMIKKRIPEKYKDKIHLVELKLPELPELPEHYHTTNGLPPHLNKTLHKALKMSAPNFSKILKEIKPDLVLYDFLVPWAEKVAEELGIPAVPLLTSGAALFSYFFNFLKRPGEEFPFEAIRLSKREQDKMREMFGTEPPEEDFLAPAKSGVMLMCTSRVIEAEYLDYCTELTGVKVVPVGPPFQDPLTEDIDDPELMAWLDTKPPHSVVYVSFGSEAFLSREDMEEVARGLLASGQYFIWVARFPKGEERPLEEVLPEGFLEAVGDRGRVLDHLVPQAHILNHPSTGGFISHCGWNSVMESIDFGVPIIAMPMQWDQPINARLLVRLGVAVEIPRDEDGRVHAADIARVIKAVISGPLGEELRAKVREISARLRAEREAEMDEAAEVLIELCRNRNAYK

SEQ ID NO: 510 - protein, 440 aa, synthetic construct
QPIKVLMFPWLALGHVNPFLRIAKQLADRGFVIYLVSTAINLELAKKRIPEKYKDKIHLVEYELPELPELPPHLHTTNGLPPHLNGTLHKALKMSAPKFEEIVKKLKPDLVLYDFLIPWAEKIAESLGVPGVPLLTSGAALFSYFFNFLKRPGHEFPFPAIRLSKREQDKMREMFGTEPTELDFLVPANAGIMLMCTSRVIEAKYLDYCQKLTNVKVVPVGAPFQDPLTEDIYDPELIRWLDTKPDNSVVYVSFGSEYFLSREQMEAVALGLLKSGVNFIWVARFPKGEEQPLEDVLPEGFLEAVGDRGRVLDHLVPQAHILNHKSTGGFISHCGWNSVMESIDFGVPIIAMPMQWDQPINARLLVELGVAVEIRRDEDGRIHPETIAQVLRDVIYGETGKKLREQVKKIAEQLRAAREEEMEEAAEELRELCRNRRALK

SEQ ID NO: 511 - protein, 440 aa, synthetic construct
QPLKVLMFPWLGLGHVNPFLRIAKQLADRGFHVYLVSTAINLEMIKKRIPEKYSDKIHLVELRLPELPELPPHYHTTNGLPPHLNKTLHKALKMAAPEFAAILREIQPDLVLYDFLVPWAEDVALAQDIPAVPLLTSGAALFSYFFNFLKRPGEEFPFEAIRLSKREQDKMREMFGTEPPEEDFLAPAKSGVMLMCTSPVIEAEYLKYCTELTNVKVVPVGPPFQDPLTEDIDDPELMAWLDTQPPGSVVYVSFGSEAFLSREDMREVALGLLLSGANFIWVARFPKGEERPLEDVLPPGFLEAVGDRGRVLDHLVPQAHILNHPATGGFISHCGWNSVMESIDFGVPIIAMPMQWDQPINARLLVRLGVAVEIPRDEDGRVHAEEIARVIKEVIFGELGKELRAKVAEISAALRARREEEMDAAAAELRRLCRNRNAYK

SEQ ID NO: 512 - protein, 440 aa, synthetic construct
QKIRVLMFPWLALGHVNPFLRIAKQLADRGFHIYLVSTPINLDLAKKRIPEKYSNSIELVEFHLPELPELPPHLHTTNGLPPHLNGTLHKALKMSKPRFSDIIRELKPDLVLYDFLIPWAEAVAASQNVPGVPLLTSGAALFSYFFNFLKRPGHEFPFPEIRLSKREQDKMREMFGTEPTELDFLVPANAGIMLMCTSREIEAKYLDYCHSLTEVKVIPVGAPFQDPLTEDIYDEELIKWLDTKEESSVVYVSFGSEYFLSKEQMEEVAFGLELSGVNFIWVARFPKGEEQNLEEVLPKGFLERIGERGRVLDHLVPQAHILNHRSTGGFISHCGWNSVMESIDFGVPIIAMPMQWDQPINARLLVEIGVAVEIKRDEDGKIHREEIAKVLKDVIFGKIGEELRKKVKELSEKLRAKREEEMDGAAEELRQLCRNRRALK

SEQ ID NO: 513 - protein, 440 aa, synthetic construct
QKMSVLMFPWLALGHVNPFLRIAKRLADRGFLIYLVSTSINLSLAKKRIPKKYSNSIHLVEYPLPELPELPPHLHTTNGLPPHLNGTLHKALEMSRPKFSEMVQELKPDLVLYDFLIPWAEEVASSQGVPGVPLLTSGAALFSYFFNFLKRPGKEFPFPAIRLSKREQDKMREMFGTEPTELDFLVPANAGVMLLCTSRVIEAKYLDYCTALTEVKVVPVGAPFQDPLTEDIYDPELINWLNTKKKNSVVYVSFGSEYFLSEEQMEEVALGLELSKVNFIWVARFPKGEEQDLEKVLPKGFLERVGDRGRVLDHLVPQAHILNHSSTGGFISHCGWNSVMESIWFGVPIIAMPMQWDQPINARLLVELGVAVEIRRDEDGRIHRDEIAQVLKDVIEGDTGKKLRSNVRKVAANLRARDEEEMNAAAEELAQLCRNRRALK

SEQ ID NO: 514 - protein, 440 aa, synthetic construct
QTFSVLMFPWLALGHVNPFLRIAKRLADRGFLIYLLSTQINLDLAKKRIPPKYSNSIHLVEYKLPELPELPPHLHTTNGLPPHLNGTLHKALKMSRPKFSEMVQSLKPDLVLYDFLIPWAESVASSHGVPGVPLLTSGAALFSYFFNFLKRPGKEFPFDAIRLSKREQDKMREMFGTEPTELDFLVPANAGIMLMCTSRVIEAKYLDYCTDLTEVKVVPVGAPFQDPLTEDIYDPELIRWLDLKPKNSVVYVSFGSEYFLSEEQMEEVALGLELSNQNFIWVARFPKGEEQNLEDVLPKGFLERVGDRGRVLDHLVPQAHILNHSSTGGFISHCGWNSVMESIWFGVPIIAMPMQWDQPINARLLVELGVAVEIRRDEDGRIHRDEIAEVLKGVIEGDIGKSLRSNVRKVAQELRNRDEEEMNAAAEELAQLCRNRRALK

SEQ ID NO: 515 - protein, 440 aa, synthetic construct
QTFQVLMFPWLALGHVNPFLRIAKKLADRGFHIYLPSTPINLNLVKKRIPPKYSNSIQLIEYHLPELPELPPHLHTTNGLPPHLNGTLHKALKMSNPRFSEIIKTLKPDLVIYDFLIPWAQKIAEAQGVPAVPLLTSGAALFSYFFNFLKRPGHEFPFPEIRLSKREQDKMREMFGTEPTELDFLVPANAGIMLMCTSREIEAKYIDYCQLLTNVKVVPVGAPFQDPLTEDIYDEELMKWLDTKPESSVVYVSFGSEYFLSKEQMEEVAYGLELSKVNFIWVARFPKGEEQNLEDVLPKGFLERVGERGRVLDHLVPQAHILNHRSTGGFISHCGWNSVMESIDFGVPIIAMPMQWDQPINARLLVEKGVAVEVKRDEDGRFHREEIAKVIREVIFGETGEKLRAKVKDLSKRLKEKREEEMDEAVEELRKLCRNRRALK

SEQ ID NO: 516 - protein, 440 aa, synthetic construct
QTFSVLMFPWLALGHVNPFLRIAKKLADRGFKIYLVSTPINLNLVKKRIPEKYSNSIHLVEFHLPELPELPPHLHTTNGLPPHLNGTLHKALEMSKPKFSEQIKTLKPDLVIYDFLIPWAEAVASSQNVPGVPLLTSGAALFSYFFNFLKRPGHEFPFPAIRLSKREQDKMREMFGTEPTELDFLVPANAGIMLMCTSREIEAKYIDYCSKLTNVKVIPVGAPFQDPLTEDIYDDELIKWLDTKPESSTVYVSFGSEYFLSREQMEEVAYGLELSKVNFIWVARFPKGEEQNLEEVLPKGFLERVGERGRVLDHLVPQAHILNHRSTGGFISHCGWNSVMESIDFGVPIIAMPMQWDQPINARLLVELGVAVEVKRDEDGKFHREEIAQVLRDVIFGKIGEELRAKVRELAEKLKAKREEEIDGAVEELRQLCKNRRALK

SEQ ID NO: 517 - protein, 440 aa, synthetic construct
QTFKVLMFPWLALGHVNPFLRIAKRLADRGFLIYLSSTQINLNLVKKRIPEKYSNSIQLVEYNLPELPELPPHLHTTNGLPPHLNGTLHKALNMSNPKFSELVRNLKPDLVLYDFLIPWAEEIAASQGVPGVPLLTSGAALFSYFFNFLKRPGHEFPFEEIRLSKREQDKMREMFGTEPTELDFLVPANAGIMLMCTSREIEAKYVDYCSELSGVKVIPVGAPFQDPLTEDIYDEELIRWLDTKEESSVVYVSFGSEYFLSREQMEEVAYGLELSNQNFIWVARFPKGEEQNLEEVLPKGFLERVGDRGRVLDHLVPQAHILNHRSTGGFISHCGWNSVMESIDFGVPIIAMPMQWDQPINARLLVELGVAVEIRRDEDGRIHRGEIARVIKEVIAGEKGEELRRNVRKMADRLKARREEEMNGAAEELKQLCRNRRALK

SEQ ID NO: 518 - protein, 440 aa, synthetic construct
QTLKVLMFPWLALGHVNPFLRIAKLLADRGFYIYLVSTQINLDLAKKRIPDKYSHSIQLVEYQLPELPELPPHLHTTNGLPPHLNGTLHKALKMSSPSFSKLIQDLKPDLVVYDFLIPWAEKVAASHGVPGVPLLTSGAALFSYFFNFLKRPGEEFPFDAIRLSKREQDKMREMFGTEPTELDFLVPANAGVMLVCTSRVIEKKYLDYCELLTKVKVVPVGAPFQDPLTEDIYDPELMSWLDTKKPNSVVYVSFGSEYFLSEEDMEEVAHGLELSGVNFIWVARFPKGEEQNLEDVLPKGFLERVGDRGRVLDHLVPQAHILAHGATGGFMSHCGWNSVMESIHFGVPIIAMPMQWDQPINARLLVELGVAVEVRRDEDGRIHRGEIARVLKDVISGETGEVLRRRVRQMAKELRARGEEEMNEAAEELRQLCRNRRALK

SEQ ID NO: 519 - protein, 440 aa, synthetic construct
QTVTVLMFPWLALGHVNPFLRIAKSLADRGFRIYLVSTAINLELAKKRIPQKYSNSIHLVEYRLPELPELPPHLHTTNGLPPHLNGTLHKALEMSRPAFAKVVADLKPDLVLYDFLIPWAESVAQAQGVPGVQLLTSGAALFSYFFNFLKRPGTEFPFPAIRLSKREQDKMREMFGTEPTELDFLVPANAGIMLMCTSRVIESKYLDYCNTLTNVKVIPVGAPFQDPLTEDIYDPELINWLNTKNPNSVVYVSFGSEYFLSREQMEEVAHGLELSGVNFIWVARFPKGEEQNLEDVLPKGFLERVGDRGRVLDHLVPQAHILNHSSTGGFISHCGWNSVMESINFGVPIIAMPMQWDQPINARLLVEAGVAVEIRRDEDGNIHRDEIANVLKDVIEGRTGEILRQNVRDMAQQLRNNDEKEMNVAAEELVQLCRNRRALK

SEQ ID NO: 520 - protein, 440 aa, synthetic construct
QTQTVFMFPWLALGHVNPFLRIAKRLADRGFKIYLGSTAINLDLVKKRIPEKYSSSIQLVEYNLPELPELPPHLHTTNGLPPHLNGTLHKALKMSNPNFSKLLQDLKPDLVVYDFLIPWAEKVASSLGIPGVPLLTSGAALFSYFFNFLKRPGHEFPFPAIRLSKREQDKMREMFGTEPTELDFLVPANAGIMLMCTSRVIERKYLDYCRSLTNVKVVPVGAPFQDPLTEDIYDDELIRWLDTKEESSVVYVSFGSEYFLSREQMEEIAYGLELSKVNFIWVARFPKGEEQNLEDVLPKGFLERVGDRGRVLDHLVPQAHILNHRSTGGFISHCGWNSVMESIDFGVPIIAMPMQWDQPINARLLVELGVAVEIERDEDGRIHRGEIARVIKEVISGEKGKVLRERVRKLAEELKKIEEEEMNGAVEELRQLCLNRRALK

SEQ ID NO: 521 - protein, 440 aa, synthetic construct
QTLSVLMFPWLALGHVNPFLRIAKKLADRGFHIYLLSTPINLNLTKKRIPYKYSHSIELVEFHLPELPELPPHLHTTNGLPPHLNGTLHKALKMSKPEFSKILQTLKPDLVIYDFLIPWAEDEANSQGIPAVPLLTSGAALFSYFFNFLKRPGHEFPFPAIRLSKREQDKMREMFGTEPTELDFLVPANAGIMLMCTSRVIEAKYIDYCSSLTNTKIVPVGAPFQDPLTEDIYDDDLLRWLDSKKPNSVVYVSFGSEYFLSKEQIEEVAYGLELSNANFIWVARFPKGEEQKLEEVLPEGFLERVGDRGRVLDHLVPQAHILNHEATGGFISHCGWNSVMESIDFGVPIIAMPMQWDQPINARLLVELGVAVEVKRDEDGRIHREEIAKVIKDVIFGKIGEELRKKVKEISEELKKRREEEMNEAAQELAQLCRNRRALK

SEQ ID NO: 522 - protein, 440 aa, synthetic construct
QKVKVLMFPWLALGHVNPFLRIAKKLADRGFHIYLSSTPINLNLAKKRIPEKYSNSIELVEFHLPELPELPPHLHTTNGLPPHLNGTLHKALTMAAPKFGDIIRTLKPDLVIYDFLIPWAETIALSHNVPGVPLLTSGAALFSYFFNFLKKPGHEFPFPEIRLSKREQDKMREMFGTEPTELDFLVPANAGIMLMCTSREIEAKYIDYCSTLTEVKVIPVGAPFQDPLTEDIYDEELIKWLDTKKPSSVVYVSFGSEYFLSKEQMEEVAHGLELSNVNFIWVARFPKGEEQNLEEVLPKGFLERVGERGRVLDHLVPQAHILNHPSTGGFISHCGWNSVMESIDFGVPIIAMPMQWDQPINARLLVEIGVAVEVKRDEDGRIHREEIAKVLKEVIFGKKGEELRKKVKELSEKMKEKEEEEMDEAAEELLKLCRNRRALK

SEQ ID NO: 523 - protein, 440 aa, synthetic construct
QTFSVLMFPWLALGHVNPFLRIAKRLADRGFKIYLVSTAINLDLAKKRIPPKYSNSIQLVEYKLPELPELPPHLHTTNGLPPHLNGTLHKALAMASPRFSDLVRELRPDLVLYDFLIPWAEAVAAAQGVPAVPLLTSGAALFSYFFNFLKRPGHEFPFEAIRLSKREQDKMREMFGTEPTELDFLVPANAGIMLMCTSREIEAKYVDYCRELTGVKVVPVGAPFQDPLTEDIYDDELISWLDTKEENSVVYVSFGSEYFLSREQMEEVAYGLELSKQNFIWVARFPKGEEQNLEDVLPKGFLERIGDRGRVLDHLVPQAHILNHRSTGGFISHCGWNSVMESIDFGVPIIAMPMQWDQPINARLLVELGVAVEVRRDEDGRIHRDEIARVIKDVIAGETGEELRRNVRKMAKRLKERKEEEMNGAAEELKKLCRNRRALK

SEQ ID NO: 524 - protein, 440 aa, synthetic construct
QTLRVVMFPWLGLGHVNPFLRIAKKLADRGFHIYLVSTPINLSMIKKRIPEKYSNSIELVELHLPELPELPPHYHTTNGLPPHLNKTLHKALKMSKPNFSKILDTIKPDLVLYDFLVPWAEKVAAERGIPAVPLLTSGAALFSYFFNFLKRPGEEFPFEAIRLSKREQDKMREMFGTEPPEEDFLAPAPSGIMLMCTSREIEAKYLDYCTELTGVKVVPVGPPFQDPLTEDIDDPDLMKWLDSKEENSTVYVSFGSEAFLSKEDMEEVAYGLELSGANFIWVARFPKGEEKNLEEVLPKGFLERVGERGRVLDHLVPQAHILNHPSTGGFISHCGWNSVMESIDFGVPIIAMPMQWDQPINARLLVELGVAVEVERDEDGKIHREEIAKVIKNVIFGKIGEELRKKVKELSKKLKSKRDEEIDEAVQELVQLCRNRNAYK

SEQ ID NO: 525 - protein, 440 aa, synthetic construct
QTQSVLMFPWLALGHVNPFLRIAKRLADRGFFIYLVSTAINLDLAKKRIPKKYSNSIKLVEYKLPELPELPPHLHTTNGLPPHLNGTLHKALRMSQPKFSEMVQELKPDLVLYDFLIPWAEKVAESQGVPGVPLLTSGAALFSYFFNFLKRPGKEFPFDAIRLSKREQDKMREMFGTEPTELDFLVPANAGVMLMCTSRVIEAKYLDYCTALTEVKVVPVGAPFQDPLTEDIYDQELINWLNTKPDNSVVYVSFGSEYFLSREQMEEVALGLELSGQNFIWVARFPKGEEQNLEDVLPKGFLERIGDRGRVLDHLVPQAHILNHKSTGGFISHCGWNSVMESIWFGVPIIAMPMQWDQPINARLLVELGVAVEIRRDEDGRIHRDEIAQVLKDVIEGDTGKKLRQNVRDMARQLRENDEKEMNDAAEELLQLCRNRRALK

SEQ ID NO: 526 - protein, 440 aa, synthetic construct
QKFRVLMFPWLALGHVNPFLRIAKQLADRGFVIYLVSTPINLNLAKKRIPYKYSNSIQLVEFHLPELPELPPHLHTTNGLPPHLNGTLHKALNMSKPRFSHIIQTLKPDLVIYDFLIPWAESVALSQNVPAVPLLTSGAALFSYFFNFLKKPGVEFPFEAIRLSKREQDKMREMFGTEPTELDFLVPANAGIMLVCTSREIEAKYLDYCSSLSEVKVVPVGAPFQDPLTEDIYDEELIKWLDTKEESSVVYVSFGSEYFLSKEEMEEVAYGLELSGVNFIWVARFPKGEEQNLEDVLPKGFLERIGDRGRVLDHLVPQAHILGHKSTGGFVSHCGWNSVMESIDFGVPIIAMPMQWDQPINARLLVELGVAVEIKRDEDGKIHRDEIAKVLKDVIFGPIGEELRKKVKELSLKMREKEEEEMDEAAEELRQLCRNRRALK

SEQ ID NO: 527 - protein, 440 aa, synthetic construct
QTLKVVMFPWLGLGHVNPFLRLAKQLADRGFHIYLVSTAINLSMIKKRIPEKYSSSIQLVELHLPELPELPPHYHTTNGLPPHLNKTLHKALKMAAPNFSKILQTLKPDLVIYDFLVPWAEKVAAAQNIPAVPLLTSGAALFSYFFNFLKRPGEEFPFEEIRLSKREQDKMREMFGTEPPEEDFLAPAQAGIMGICTSREIEQKYIDYCSVLSNSKVVPVGPPFQDPLTEDIDNPELMKWLDTKEENSVVYVSFGSEAFLSREEMEEVAFGLELSGVNFIWVARFPKGEEQKLEDVLPKGFLERIGERGRVLDHLVPQAHILGHPSTGGFVSHCGWNSVMESIYFGVPIIAMPMQWDQPINARLMVELGVAVEVERDEDGKVHREEIAKVLKEVIFGKVGEVLRKKVKELSKKLKEKEEEEIDEFVQQLVQLCRNRNAYK

SEQ ID NO: 528 - protein, 440 aa, synthetic construct
QTFQVLMFPWLALGHVNPFLRIAKKLADRGFKIYLSSTPINLNLAKKRIPPKYSNSIHLIEFHLPELPELPPHLHTTNGLPPHLNGTLHKALKMSSPNFSKIIQTLKPDLVLYDFLIPWAEKIAESQNVPAVPLLTSGAALFSYFFNFLKRPGHEFPFPEIRLSKREQDKMREMFGTEPTELDFLVPANAGIMLMCTSRVIEAKYIDYCSELTNVKVIPVGAPFQDPLTEDIYDDELIKWLDTKEPNSVVYVSFGSEYFLSKEQMEEVAYGLELSGVNFIWVARFPKGEEQNLEDVLPKGFLERVGERGRVLDHLVPQAHILNHRSTGGFISHCGWNSVMESIDFGVPIIAMPMQWDQPINARLLVELGVAVEVRRDEDGKFHREEIAKVIKEVIFGETGEKLRANVKKIAEELRKRREEEMNGAVEELRKLCKNRRALK

SEQ ID NO: 529 - protein, 440 aa, synthetic construct
QTLSVLMFPWLALGHVNPFLRIAKALADRGFVIYLLSTPINLNLTKKRIPEKYSNSIQLVEFALPELPELPPHLHTTNGLPPHLNGTLHKALKMSKPNFSNILKTLKPDLVIYDFLIPWAELEANSQGIPGVPLLTSGAALFSYFFNFLKRPGHEFPFPAIRLSKREQDKMREMFGTEPTELDFLVPANAGIMLMCTSREIEGKYIDYCSKLTNVKIVPVGAPFQDPLTEDIYDDDLIRWLDSKEENSVVYVSFGSEYFLSREQMEEVAHGLELSGANFIWVARFPKGEEQNLEEVLPKGFLERVGERGRVLDHLVPQAHILNHRSTGGFISHCGWNSVMESIDFGVPIIAMPMQWDQPINARLLVELGVAVEVERDEDGKIHREEIAKVIKDVIFGPIGESLRKKVKEISKKLREKREEEMDEAAQELRQLCLNRRALK

SEQ ID NO: 530 - protein, 440 aa, synthetic construct
QTLSVLMFPWLALGHVNPFLRIAKKLADRGFHIYLVSTAINLNLAKKRIPEKYSNSIELVEYHLPELPELPPHLHTTNGLPPHLNGTLHKALKMSSPNFSNIIKNLKPDLVLYDFLIPWAEKVAESHGVPAVPLLTSGAALFSYFFNFLKRPGHEFPFPEIRLSKREQDKMREMFGTEPTELDFLVPANAGIMLMCTSREIEGKYLDYCQSLTNVKIVPVGAPFQDPLTEDIYDDDLIKWLNSKKPNSTVYVSFGSEYFLSKEQMEEVAFGLELSGVNFIWVARFPKGEEQNLEEVLPKGFLERVGERGRVLDHLVPQAHILNHPSTGGFISHCGWNSVMESIDFGVPIIAMPMQWDQPINARLLVELGVAVEVKRDEDGKIHREEIAKVLKDVIFGKTGEELRKKVKELSLKLKAKREEEMDGAAQELAQLCKNRRALK

SEQ ID NO: 531 - protein, 440 aa, synthetic construct
QKMSVLMFPWLALGHVNPFLRIAKALADRGFIIYLVSTAINLSLAKKRIPKKYSNSIHLVEYKLPELPELPPHLHTTNGLPPHLNGTLHKALEMSRPRFSNMIRDLKPDLVLYDFLIPWAEEVASSHGVPGVPLLTSGAALFSYFFNFLKRPGHEFPFPEIRLSKREQDKMREMFGTEPTELDFLVPANAGLMLMCTSRVIEAKYLDYCTTLTEVKVVPVGAPFQDPLTEDIYDQELINWLNTKKPNSTVYVSFGSEYFLSEEQMEEVAHGLELSKQNFIWVARFPKGEEQNLENVLPKGFLERVGDRGRVLDHLVPQAHILNHSSTGGFISHCGWNSVMESIDFGVPIIAMPMQWDQPINARLLVELGVAVEIRRDEDGRIHRDEIAQVLKDVIEGDIGKKLRSNVRDIAGELRKRKEEEMNAAAEELKQLCRNRRALK

SEQ ID NO: 532 - protein, 440 aa, synthetic construct
QTIRVLMFPWLALGHVNPFLRIAKRLADRGFKIYLVSTKINLDLVKKRIPKKYSNSIQLVEYQLPELPELPPHLHTTNGLPPHLNGTLHKALKMSSPNFSKLLQELKPDLVVYDFLIPWAEKVASSLGIPGVPLLTSGAALFSYFFNFLKRPGHEFPFPAIRLSKREQDKMREMFGTEPTELDFLVPANAGIMLVCTSRVIEEKYLDYCHSLTNVKVIPVGAPFQDPLTEDIYDEELISWLDTKKPNSTVYVSFGSEYFLSREQMEEIAHGLELSKVNFIWVARFPKGEEQNLEDVLPKGFLERVGDRGRVLDHLVPQAHILAHPSTGGFLSHCGWNSVMESINFGVPIIAMPMQWDQPINARLLVELGVAVEIERDEDGRIHRGEIARVIRDVILGEIGEKLRENVRKIAKQIEENKEKEINGAVEELKQLCRNRRALK

SEQ ID NO: 533 - protein, 440 aa, synthetic construct
QRLRVTMFPWLGLGHVNPFLRIAKQLADRGFHIYLVSTPINLSMIKKRIPEKYSNSIELVELHLPELPELPPHYHTTNGLPPHLNKTLHKALKMSKPNFSNILNTIKPDLVIYDFLVPWAEDVALSQNIPAVPLLTSGAALFSYFFNFLKRPGEEFPFEAIRLSKREQDKMREMFGTEPPEEDFLAPAKSGIMLMCTSREIEAKYIDYCTELTGTKIVPVGPPFQDPLTEDIDDPELIDWLNKKEENSTVYVSFGSEAFLSREEMEEVAHGLELSKVNFIWVARFPKGEEQPLESVLPKGFLERVGERGRVLDHLVPQAHILNHSSTGGFISHCGWNSVMESIDFGVPIIAMPMQWDQPINARLLVELGVAVEVKRDEDGRVHREEIARVLKEVIFGKIGESLRAKVKELSAKLKAKRDEEIDGAVQELIQLCRNRNAYK

SEQ ID NO: 534 - protein, 440 aa, synthetic construct
QKIRVLMFPWLALGHVNPFLRIAKKLADRGFHIYLVSTAINLELAKKRIPEKYSSSIELVEFALPELPELPPHLHTTNGLPPHLNGTLHKALEMSKPRFSDIVRTLKPDLVLYDFLIPWAEKVAAAQNVPGVPLLTSGAALFSYFFNFLKRPGHEFPFEAIRLSKREQDKMREMFGTEPTELDFLVPANAGIMLMCTSRVIEAKYIDYCSSLSEVKIVPVGAPFQDPLTEDIYDEELIKWLDTKPDSSVVYVSFGSEYFLSREQMEEVAYGLELSGQNFIWVARFPKGEEQNLEEVLPKGFLERVGERGRVLDHLVPQAHILNHRSTGGFISHCGWNSVMESIDFGVPIIAMPMQWDQPINARLLVEVGVAVEIRRDEDGKIHRDEIAQVIKDVIAGKIGEELRKKVKELSEKMKAKEEEEMDAAAEELRQLCRNRRALK

SEQ ID NO: 535 - protein, 440 aa, synthetic construct
QTLKVLMFPWLALGHVNPFLRIAKLLADRGFKIYLSSTSINLSLAKKRIPPKYSNSIHLVEYQLPELPELPPHLHTTNGLPPHLNGTLHKALRMSSPRFSKMVQELKPDLVLYDFLIPWAEKIAQSQGVPGVPLLTSGAALFSYFFNFLKKPGKEFPFPAIRLSKREQDKMREMFGTEPTELDFLVPANAGIMLMCTSRVIEAKYVDYCNELTKVKIIPVGAPFQDPLTEDIYDDELIRWLDTKDESSVVYVSFGSEYFLSREQMEEVAFGLELSGQNFIWVARFPKGEEQNLEDVLPKGFLERVGDRGRVLDHLVPQAHILAHKSTGGFMSHCGWNSVMESIHFGVPIIAMPMQWDQPINARLLVELGVAVEVRRDEDGRIHRDEIARVLKDVISGRTGEVLRRRVRDIAKNLRKRKEEEINAAAEELAKLCRNRRALK

SEQ ID NO: 536 - protein, 440 aa, synthetic construct
QKLRVVMFPWLGLGHVNPFLRIAKLLADRGFHIYLVSTPINLNMIKKRIPEKYSHSIELVELHLPELPELPPHYHTTNGLPPHLNKTLHKALKMSRPNFSNILKTIKPDLVLYDFLVPWAAEAAAEQNIPAVPLLTSGAALFSYFFNFLKRPGEEFPFEAIRLSKREQDKMREMFGTEPPEEDFLAPAPSGIMLMCTSRVIEKKYIDYCTELTGTKIVPVGPPFQDPLTEDIDDEDLMKWLDTKEENSVVYVSFGSEAFLSKEDMTEVAYGLELSGANFIWVARFPKGEEKNLEEVLPKGFLERVGERGRVLDHLVPQAHILNHPSTGGFISHCGWNSVMESIDFGVPIIAMPMQWDQPINARLLVELGVAVEVKRDEDGKFHREEIAKVIKDVIFGKTGEKLRKKVKEVSKQLKLNRDEEIDGAAQELIQLCRNRNAYK

SEQ ID NO: 537 - protein, 440 aa, synthetic construct
QTLRVVMFPWLGLGHVNPFLRIAKKLADRGFHIYLVSTPINLNMIKKRIPEKYSNSIELVELHLPELPELPPHYHTTNGLPPHLNKTLHKALKMSKPNFSNILKTLKPDLVIYDFLVPWAEKVAAEQNIPAVRLLTSGAALFSYFFNFLKRPGEEFPFEAIRLSKREQDKMREMFGTEPPEEDFLAPAKSGIMLMCTSREIESKYIDYCNVLSGTKIVPVGPPFQDPLTEDIDDPDLMKWLDTKPENSTVYVSFGSEAFLSKEEMTEVAYGLELSNANFIWVARFPKGEEKNLEEVLPEGFLERVGERGRVLDHLVPQAHILSHPSTGGFVSHCGWNSVMESIKFGVPIIAMPMQWDQPINARLLVEVGVAVEIERDEDGKFHRGEIAKVIKGVIFGEIGEKLRKKVKELSEKLKSKEEEEIDEAVQELVQLCRNRNAYK

SEQ ID NO: 538 - protein, 440 aa, synthetic construct
QTQRVLMFPWLALGHVNPFLRIAKKLADRGFLIYLLSTPINLNLAKKRIPEKYSDSIQLVEFHLPELPELPPHLHTTNGLPPHLNGTLHKALKMSSPNFSNLVKTLEPDLVVYDFLIPWAEEVANSQGVPAVPLLTSGAALFSYFFNFLKRPGHEFPFPAIRLSKREQDKMREMFGTEPTELDFLVPANAGVMLICTSRVIEAKYIDYCSSLTNVKVVPVGAPFQDPLTEDIYDEELIKWLDTKDPNSTVYVSFGSEYFLSKEEMEEVAFGLELSNVNFIWVARFPKGEEQNLEDVLPKGFLERVGERGRVLDHLVPQAHILNHKSTGGFVSHCGWNSVMESIDFGVPIIAMPMQWDQPINARLLVELGVAVEVRRDEDGRFHREEIAKVLKDVITGKTGENLRAKVREIAENLKSVRDEEMDVAAEELRQLCRNRRALK

SEQ ID NO: 539 - protein, 440 aa, synthetic construct
QKFSVLMFPWLALGHVNPFLRIAKRLADRGFFIYLVSTAINLDLAKKRIPKKYSNSIQLIEYKLPELPELPPHLHTTNGLPPHLNGTLHKALKMSNPNFSNLVRELKPDLVLYDFLIPWAETIASSQGVPGVPLLTSGAALFSYFFNFLKRPGHEFPFPAIRLSKREQDKMREMFGTEPTELDFLVPANAGIMLMCTSRVIEAKYVDYCASLTGVKVVPVGAPFQDPLTEDIYDDELISWLNTKKPNSTVYVSFGSEYFLSREQMEEVAFGLELSKVNFIWVARFPKGEEQNLEDVLPKGFLERVGDRGRVLDHLVPQAHILNHESTGGFISHCGWNSVMESIDFGVPIIAMPMQWDQPINARLLVELGVAVEIRRDEDGNIHRDEIARVLKDVIEGEIGEKLRENVRKMADELRKRREEEMNEAAEELAKLCRNRRALK

SEQ ID NO: 540 - protein, 440 aa, synthetic construct
QTPTVLMFPWLALGHVNPFLRIAKRLADRGFYIYLVSTAINLSLVKKRIPDKYSHSIQLVEFQLPELPELPPHYHTTNGLPPHLNGTLHKALKMSKPRFSQLIRDLKPDLVVYDFLIPWAEAAAAAQGVPGVPLLTSGAALFSYFFNFLKRPGHEFPFPEIRLSKREQDKMREMFGTEPTELDFLVPANAGIMLMCTSRAIESKYLDYCGKLTNVKVVPVGAPFQDPLTEDIYDDDLLRWLDTKPDNSVVYVSFGSEYFLSREDIEEIAHGLELSKVNFIWVARFPKGEEQNLEDVLPKGFLERVGDRGRVLDHLVPQAHILSHRSTGGFLSHCGWNSVMESIDFGVPIIAMPMQWDQPINARLLVELGVAVEIERDEDGRIHRGEIARVLKDVIEGETGKSLRRRVRDLAEELRKNRDEEMNGAAEELRQLCLNRRALK

SEQ ID NO: 541 - protein, 440 aa, synthetic construct
QTPTVLMFPWLALGHVNPFLRIAKKLADRGFYIYLLSTAINLDLVKKRIPKKYSNSIQLVEYQLPELPELPPHLHTTNGLPPHLNGTLHKALKMSQPRFSQLIQTLKPDLVVYDFLIPWAEKAAESQGVPGVPLLTSGAALFSYFFNFLKRPGHEFPFPAIRLSKREQDKMREMFGTEPTELDFLVPANAGIMLMCTSREIEAKYLDYCEKLTNVKVVPVGAPFQDPLTEDIYDPELISWLNTKEPNSVVYVSFGSEYFLSREQMEEVAYGLELSKVNFIWVARFPKGEEQNLEEVLPKGFLERVGDRGRVLDHLVPQAHILNHPATGGFISHCGWNSVMESIDFGVPIIAMPMQWDQPINARLLVELGVAVEVERDEDGRIHRGEIARVLKDVIYGETGKELRERVRKLAENLKNNRDEEMNEAAEELRQLCLNRRALK

SEQ ID NO: 542 - protein, 440 aa, synthetic construct
QTLKVVMFPWLGLGHVNPFLRIAKKLADKGFHIYLVSTPINLNMIKKRIPEKYSSSIQLVELHLPELPELPPHYHTTNGLPPHLNKTLHKALKMSSPNFSKILQNLKPDLVLYDFLVPWAEKVASSLNIPAVPLLTSGAALFSYFFNFLKRPGEEFPFEEIRLSKREQDKMREMFGTEPPEEDFLAPAQAGIMLMCTSREIERKYIDYCSVLTESEVVPVGPPFQDPLTEDIDDEELMKWLNTKEKHSVVYVSFGSEAFLSKEDMEEVAYGLELSNVNFIWVARFPKGEEQNLEDVLPKGFLERVGERGRVLDHLVPQAHILNHPSTGGFISHCGWNSVMESIDFGVPIIAMPMQWDQPINARLLVELGVAVEVKRDEDGKIHREEIAKVIKEVISGEIGEILRKKVKELSEKLRANREKEMNEAVQKLVQLCRNRNAYK

SEQ ID NO: 543 - protein, 440 aa, synthetic construct
QKIRVLMFPWLALGHVNPFLRIAKKLADRGFHIYLWSTPINLNLAKKRIPEKYSNSIELVEFHLPELPELPPHLHTTNGLPPHLNGTLHKALKMSKPRFSEIIKTLKPDLVLYDFLIPWAEAVAASQNVPGVPLLTSGAALFSYFFNFLKRPGHEFPFEAIRLSKREQDKMREMFGTEPTELDFLVPANAGIMLMCTSREIEAKYIDYCSSLTEVKIIPVGAPFQDPLTEDIYDEELIKWLDTKEESSVVYVSFGSEYFLSKEQMEEVAYGLELSGVNFIWVARFPKGEEQNLEEVLPKGFLERVGERGRVLDHLVPQAHILNHRSTGGFISHCGWNSVMESIDFGVPIIAMPMQWDQPINARLLVEIGVAVEIKRDEDGKIHREEIAKVLKEVIFGKIGEELRKKVKELSEKMRKKREEEMDGAAEELRKLCRNRRALK

SEQ ID NO: 544 - protein, 440 aa, synthetic construct
QKVRVLMFPWLALGHVNPFLRIAKKLADRGFHIYLVSTPINLNLAKKRIPEKYSNSIELVEFHLPELPELPPHLHTTNGLPPHLNGTLHKALAMAAPRFSDIIRDLKPDLVIYDFLIPWAEAVALSHNVPAVPLLTSGAALFSYFFNFLKKPGHEFPFPEIRLSKREQDKMREMFGTEPTELDFLVPANAGIVLMCTSREIEAKYIDYCSSLSEVKIVPVGAPFQDPLTEDIYDEELIKWLDTKKPSSTVYVSFGSEYFLSKEQMEEVAYGLELSNVNFIWVARFPKGEEQNLEEVLPKGFLERVGERGRVLDHLVPQAHILNHPSTGGFISHCGWNSVMESIDFGVPIIAMPMQWDQPINARLLVEIGVAVEIKRDEDGRIHREEIAKVLKDVIFGKKGEELRKKVKELSEKMREKEEEEMDGAAEELLQLCRNRRALK

SEQ ID NO: 545 - protein, 440 aa, synthetic construct
QTFKVLMFPWLALGHVNPFLRIAKRLADRGFLIYLSSTKINLDLAKKRIPPKYSNSIQLVEYNLPELPELPPHLHTTNGLPPHLNGTLHKALRMSNPNFSNLVRELKPDLVVYDFLIPWAESVANSQGVPGVPLLTSGAALFSYFFNFLKRPGIEFPFPAIRLSKREQDKMREMFGTEPTELDFLVPANAGIMLVCTSRVIEAKYLDYCHKLTGVKVVPVGAPFQDPLTEDIYDDELMRWLDTKKESSTVYVSFGSEYFLSREQMEEVAHGLELSKVNFIWVARFPKGEEQNLEDVLPKGFLERVGDRGRVLDHLVPQAHILNHKSTGGFMSHCGWNSVMESIHFGVPIIAMPMQWDQPINARLLVELGVAVEVRRDEDGNIHRGEIARVLKEVIAGEIGEELRRRVRKIADELNKRKEEEMNEAAEELKQLCRNRRALK

SEQ ID NO: 546 - protein, 440 aa, synthetic construct
QTPTVLMFPWLALGHVNPFLRIAKALADRGFYIYLLSTAINLSLAKKRIPDKYSHSIQLVEYQLPELPELPPHLHTTNGLPPHLNGTLHKALRMSSPRFSQLVRDLKPDLVVYDFLIPWAEKVAESHGVPGVPLLTSGAALFSYFFNFLKRPGHEFPFPAIRLSKREQDKMREMFGTEPTELDFLVPANAGIMLMCTSREIEGKYLDYCELLTNVKVVPVGAPFQDPLTEDIYDDELISWLDTKPENSVVYVSFGSEYFLSREQMEEVAHGLELSGANFIWVARFPKGEEQNLEDVLPKGFLERVGDRGRVLDHLVPQAHILNHRSTGGFISHCGWNSVMESIDFGVPIIAMPMQWDQPINARLLVELGVAVEVERDEDGRIHRGEIAEVIKGVISGEIGEELRRRVRKLAENLRKRREEEMNGAAEELRQLCLNRRALK

SEQ ID NO: 547 - protein, 440 aa, synthetic construct
QTPSVLMFPWLALGHVNPFLRIAKRLADRGFYIYLLSTAINLNLIKKRIPDKYSHSIQLVEFQLPELPELPPHLHTTNGLPPHLNGTLHKALKMSSPKFSELVKTLKPDLVVYDFLIPWAEKVAESHGVPGVPLLTSGAALFSYFFNFLKRPGHEFPFPAIRLSKREQDKMREMFGTEPTELDFLVPANAGIMLMCTSRAIEGKYLDYCSLLTNVKVVPVGAPFQDPLTEDIYDDELIRWLDTKEENSTVYVSFGSEYFLSREQMEEVAHGLELSGANFIWVARFPKGEEQNLEEVLPKGFLERVGDRGRVLDHLVPQAHILSHGSTGGFMSHCGWNSVMESIYFGVPIIAMPMQWDQPINARLLVELGVAVEVERDEDGRFHRGEIARVIKDVIYGELGKELRRRVRDLAEELKKNEDEEMNEAAEELLQLCKNRRALK

SEQ ID NO: 548 - protein, 440 aa, synthetic construct
QTPSVLMFPWLALGHVNPFLRIAKQLADRGFHIYLYSTPINLNLAKKRIPEKYSHSIELVEYHLPELPELPPHLHTTNGLPPHLNGTLHKALKMSKPNFSQQVKTLNPDLVLYDFLIPWAELVAESQGVPAVPLLTSGAALFSYFFNFLKRPGHEFPFPAIRLSKREQDKMREMFGTEPTELDFLVPANAGIMLMCTSRVIEGKYLDYCQSLTNVKIVPVGAPFQDPLTEDIYDDELIKWLDSKEPNSTVYVSFGSEYFLSKEQMEEVAHGLELSKVNFIWVARFPKGEEQNLEEVLPKGFLERVGERGRVLDHLVPQAHILNHRSTGGFISHCGWNSVMESIDFGVPIIAMPMQWDQPINARLLVELGVAVEVKRDEDGKFHREEIAKVLKDVIFGPLGESLRKKVKEVSEKLRKNRDEEMDGAAEELLQLCKNRRALK

SEQ ID NO: 549 - protein, 440 aa, synthetic construct
QKIRVLMFPWLALGHVNPFLRIAKKLADRGFHIYLSSTAINLELAKKRIPEKYSSSIELVEFHLPELPELPPHLHTTNGLPPHLNGTLHKALNMSKPEFSNIIKTLKPDLVIYDFLIPWAESVANSQNVPGVPLLTSGAALFSYFFNFLKKPGHEFPFPEIRLSKREQDKMREMFGTEPTELDFLVPANAGIMLMCTSREIEAKYIDYCSSLSEVKVVPVGAPFQDPLTEDIYDDELMKWLDTKEPNSVVYVSFGSEYFLSKEQMEEIAYGLELSNVNFIWVARFPKGEEQNLEEVLPKGFLERVGDRGRVLDHLVPQAHILNHPSTGGFISHCGWNSVMESIDFGVPIIAMPMQWDQPINARLLVEIGVAVEIKRDEDGKIHREEIAKVLKDVIFGKKGEVLRKKVRELAEKMKAKEEEEMDEAAEELRKLCRNRRALK

SEQ ID NO: 550 - protein, 440 aa, synthetic construct
QTLKVVMFPWLGLGHVNPFLRIAKQLADRGFKIYLVSTPINLNMIKKRIPEKYSNSIELVELHLPELPELPPHYHTTNGLPPHLNKTLHKALKMASPNFSKILENLKPDLVIYDFLVPWAEKVASSLNIPAVPLLTSGAALFSYFFNFLKRPGEEFPFEAIRLSKREQDKMREMFGTEPPEEDFLAPAQAGIMLMCTSRVIEEKYIDYCSVLTEAKVVPVGPPFQDPLTEDIDDPELMKWLDTKEDHSVVYVSFGSEAFLSKEEMEEVAFGLELSNVNFIWVARFPKGEEQKLEDVLPKGFLERIGERGRVLDHLVPQAHILNHRSTGGFISHCGWNSVMESIDFGVPIIAMPMQWDQPINARLLVELGVAVEIERDEDGKFHREEIAKVIRGVIFGEIGEVLRKKVKEISKKLKEKKEEEMDGAVQELIQLCRNRNAYK

SEQ ID NO: 551 - protein, 440 aa, synthetic construct
QTLKIVMFPWLGLGHVNPFLRIAKKLADRGFHIYLVSTPINLNMIKKRIPEKYSNSIHLVELHLPELPELPPHYHTTNGLPPHLNKTLHKALKMSKPNFSNILKTIKPDLVIYDFLVPWAEDVAAEQNIPAVPLLTSGAALFSYFFNFLKRPGEEFPFEEIRLSKREQDKMREMFGTEPPEEDFLAPARSGIMLMCTSRVIEEKYIDYCTELTGVKVVPVGPPFQDPLTEDIDDEELMKWLDTKEESSVVYVSFGSEAFLSKEEMEEVAFGLELSGVNFIWVARFPKGEERRLEDVLPEGFLERVGERGRVLDHLVPQAHILNHPSTGGFISHCGWNSVMESIDFGVPIIAMPMQWDQPINARLLVEVGVAVEVKRDEDGKFHREEIAKVIKEVIFGKTGEILRKKVKEISEKLKEKKEEEMDGAVEELVQLCRNRNAYK

SEQ ID NO: 552 - protein, 440 aa, synthetic construct
QKAKVLMFPWLALGHVNPFLRIAKLLADRGFYIYLVSTSINLNLAKKRIPDKYSNSIQLVEFQLPELPELPPHLHTTNGLPPHLNGTLHKALKMSKPKFSELIRNLKPDLVVYDFLIPWAEAEASSQGVPAVQLLTSGAALFSYFFNFLKKPGIEFPFDAIRLSKREQDKMREMFGTEPTELDFLVPANAGIMLVCTSRVIEAKYLDYCEELTKVKVVPVGAPFQDPLTEDIYDPELISWLDTKEDFSTVYVSFGSEYFLSREDMEEVALGLELSGQNFIWVARFPKGEEQNLEDVLPKGFLERVGDRGRVLDHLVPQAHILNHRSTGGFMSHCGWNSVMESIDFGVPIIAMPMQWDQPINARLLVELGVAVEVRRDEDGRIHRGEIARVLKDVIAGETGKELRRRVRDMAKRLRARRDEEMNGAAEELLQLCRNRRALK

SEQ ID NO: 553 - protein, 440 aa, synthetic construct
QKFSVLMFPWLALGHVNPFLRIAKRLADRGFFIYLVSTAINLDLVKKRIPPKYSNSIQLVEYNLPELPELPPHLHTTNGLPPHLNGTLHKALNMSSPNFSNLVKNLKPDLVVYDFLIPWAEAIANSQGVPAVPLLTSGAALFSYFFNFLKRPGHEFPFEEIRLSKREQDKMREMFGTEPTELDFLVPANAGIMLMCTSRVIEKKYLDYCQELTGVKIIPVGAPFQDPLTEDIYDEELMSWLDTKEPNSVVYVSFGSEYFLSREQMEEIAFGLELSKANFIWVARFPKGEEQNLEDVLPKGFLERIGDRGRVLDHLVPQAHILNHRSTGGFISHCGWNSVMESIDFGVPIIAMPMQWDQPINARLLVELGVAVEIRRDEDGRIHRDEIARVIKEVIFGEIGEELRRNVRKIADNLKNRKEEEMNGAAEELKQLCRNRRALK

SEQ ID NO: 554 - protein, 440 aa, synthetic construct
QTIRVLMFPWLALGHVNPFLRIAKQLADRGFHIYLSSTPINLELAKKRIPEKYSSSIELVEYHLPELPELPPHLHTTNGLPPHLNGTLHKALNMAKPNFSKQIQTLQPDLVLYDFLIPWAESVALSHNVPGVPLLTSGAALFSYFFNFLKRPGHEFPFPEIRLSKREQDKMREMFGTEPTELDFLVPANAGIMLMCTSREIEEKYIDYCHELTNVKVIPVGAPFQDPLTEDIYDEELIRWLDTKEDSSTVYVSFGSEYFLSKEQMEEVAYGLELSNVNFIWVARFPKGEEQNLEEVLPKGFLERVGERGRVLDHLVPQAHILNHRSTGGFISHCGWNSVMESIDFGVPIIAMPMQWDQPINARLLVEIGVAVEIRRDEDGKIHREEIAKVLRDVIFGKKGEVLRKKVRELSERMKARKEEEMDEAAEQLRQLCRNRRALK

SEQ ID NO: 555 - protein, 440 aa, synthetic construct
QTPQVLMFPWLALGHVNPFLRIAKKLADRGFHIYLLSTPINLSLTKKRIPEKYSNSIELVEYALPELPELPPHLHTTNGLPPHLNGTLHKALKMSSPNFSQIVKTLKPDLVLYDFLIPWAERVAESHGVPAVPLLTSGAALFSYFFNFLKRPGHEFPFPAIRLSKREQDKMREMFGTEPTELDFLVPANAGVMLMCTSREIEAKYIDYCQSLTNVKIVPVGAPFQDPLTEDIYDDDLIKWLDSKEENSTVYVSFGSEYFLSKEQMEEVAYGLELSGVNFIWVARFPKGEEQNLEDVLPKGFLERVGERGRVLDHLVPQAHILNHRSTGGFISHCGWNSVMESIDFGVPIIAMPMQWDQPINARLLVELGVAVEVKRDEDGKFHREEIAKVLKDVIFGKTGEILRKNVKEISEKLKKKRDEEMDGAAQELLQLCKNRRALK

SEQ ID NO: 556 - protein, 440 aa, synthetic construct
QTPTILMFPWLALGHVNPFLRIAKKLADRGFHIYLFSTPINLSLTKKRIPYKYSHSIELVEYHLPELPELPPHLHTTNGLPPHLNGTLHKALKMSKPNFSKQLQNLQPDLVIYDFLIPWAEHAASSQGIPAVPLLTSGAALFSYFFNFLKRPGHEFPFPAIRLSKREQDKMREMFGTEPTELDFLVPANAGIMLMCTSRSIEAKYIDYCSSLTNVKIVPVGAPFQDPLTEDIYDPELLKWLDSKEPNSTVYVSFGSEYFLSKEQMEEVAHGLELSNANFIWVARFPKGEEQDLESVLPKGFLERVGDRGRVLDHLVPQAHILNHPSTGGFISHCGWNSVMESIDFGVPIIAMPMQWDQPINARLLVELGVAVEVKRDEDGKFHREEIAQVIKDVIFGKTGEELRRNVKKLSEELRAKRDEEMNGAAQELLQLCRNRRALK

SEQ ID NO: 557 - protein, 440 aa, synthetic construct
QTIRVLMFPWLALGHVNPFLRIAKKLADRGFHIYLVSTAINLELAKKRIPEKYSSSIELVEFALPELPELPPHLHTTNGLPPHLNGTLHKALNMSKPRFSEIIKTLKPDLVIYDFLIPWAEAVASSQNVPGVQLLTSGAALFSYFFNFLKKPGVEFPFPEIRLSKREQDKMREMFGTEPTELDFLVPANAGIMLICTSREIEAKYIDYCQSLSEVKVVPVGAPFQDPLTEDIYDEELMRWLDTKKPNSVVYVSFGSEYFLSKEEMEEVAFGLELSGVNFIWVARFPKGEEQNLEEVLPKGFLERIGERGRVLDHLVPQAHILGHESTGGFVSHCGWNSVMESIYFGVPIIAMPMQWDQPINARLLVEIGVAVEIKRDEDGKIHREEIAKVLKDVIFGKTGEILRAKVKELAEKMKAREEEEMDGAAEELRQLCRNRRALK

SEQ ID NO: 558 - protein, 440 aa, synthetic construct
QKIKVLMFPWLALGHVNPFLRIAKRLADRGFLIYLVSTAINLDLTKKRIPDKYSSSIQLVEYQLPELPELPPHLHTTNGLPPHLNGTLHKALEMSRPRFSDLVRELKPDLVLYDFLIPWAEEVAASLGVPGVPLLTSGAALFSYFFNFLKRPGHEFPFPAIRLSKREQDKMREMFGTEPTELDFLVPANAGIVLMCTSRVIESKYLDYCHSLTKVKIIPVGAPFQDPLTEDIYDPELMSWLDTKKENSVVYVSFGSEYFLSREQMEEVAHGLELSGVNFIWVARFPKGEEQNLEDVLPKGFLERIGDRGRVLDHLVPQAHILNHKSTGGFISHCGWNSVMESIDFGVPIIAMPMQWDQPINARLLVELGVAVEIRRDEDGRIHRGEIARVLKEVINGEIGEELRRRVRDIAKNLRNRDEEEMNAAAEELKQLCRNRRALK

SEQ ID NO: 559 - protein, 440 aa, synthetic construct
QTLRVTMFPWLGLGHVNPFLRIAKKLADRGFHIYLVSTPINLSMIKKRIPEKYSNSIELVELHLPELPELPPHYHTTNGLPPHLNKTLHKALKMSSPNFSNILKTIKPDLVLYDFLVPWAAKVAAEQGIPAVPLLTSGAALFSYFFNFLKRPGEEFPFEAIRLSKREQDKMREMFGTEPPEEDFLAPAPSGIMLMCTSRVIEAKYIDYCTELTGTKIVPVGPPFQDPLTEDIDDPDLMKWLDSKEENSVVYVSFGSEAFLSKEDMEEVAYGLELSGANFIWVARFPKGEEKKLEEVLPKGFLERVGERGRVLDHLVPQAHILNHPSTGGFISHCGWNSVMESIDFGVPIIAMPMQWDQPINARLLVELGVAVEVERDEDGKVHRGEIAKVIKDVISGKTGEILRKKVKEVSEKLKKNRDEEIDEAAQELVQLCRNRNAYK

SEQ ID NO: 560 - protein, 440 aa, synthetic construct
QKLRVVMFPWLGLGHVNPFLRIAKKLADRGFHIYLVSTPIILNMIKKRIPEKYSSSIQLVELHLPELPELPPHYHTTNGLPPHLNKTLHKALKMASPNFSNILKTLKPDLVIYDFLVPWAEKVASSLNIPAVPLLTSGAALFSYFFNFLKRPGEEFPFEEIRLSKREQDKMREMFGTEPPEEDFLAPAQAGIMLMCTSREIEAKYIDYCSVLSESKVVPVGPPFQDPLTEDIDNEELMKWLDTKEENSVVYVSFGSEAFLSKEEMEEVAYGLELSNQNFIWVARFPKGEEQKLEEVLPKGFLERIGERGRVLDHLVPQAHILGHSSTGGFISHCGWNSVMESIYFGVPIIAMPMQWDQPINARLLVELGVAVEVKRDEDGKFHREEIAKVIKEVIAGEIGEVLRKKVKELSKKLKEKEEEEIDGAVEELVQLCRNRNAYK

SEQ ID NO: 561 - protein, 440 aa, synthetic construct
QTQRVLMFPWLALGHVNPFLRIAKKLADRGFLIYLSSTPINLNLAKKRIPEKYSDSIQLVEFHLPELPELPPHYHTTNGLPPHLNGTLHKALKMSKPNFSNIVKTLKPDLVIYDFLIPWAEDVANSQGIPAVPLLTSGAALFSYFFNFLKKPGVEFPFPAIRLSKREQDKMREMFGTEPTELDFLVPANAGVMLICTSRTIEAKYIDYCSELTNVKVVPVGAPFQDPLTEDIYDEELMKWLDTKDENSTVYVSFGSEYFLSKEEMEEVAYGLELSGVNFIWVARFPKGEEQNLEDVLPKGFLERVGERGRVLDHLVPQAHILNHSSTGGFVSHCGWNSVMESIDFGVPIIAMPMQWDQPINARLLVELGVAVEIKRDEDGKLHREEIAKVLKDVITGKTGENLRRKVREISENLKSKRDEEMDVAAQELVQLCRNRRALK

SEQ ID NO: 562 - protein, 440 aa, synthetic construct
QTPKVLMFPWLALGHVNPFLRIAKLLADRGFLIYLVSTPINLSLAKKRIPYKYSNSIHLVEYHLPELPELPPHLHTTNGLPPHLNGTLHKALKMSKPNFSNIVKTLKPDLVLYDFLIPWAEKVAESQGVPAVPLLTSGAALFSYFFNFLKRPGHEFPFEAIRLSKREQDKMREMFGTEPTELDFLVPANAGIMLMCTSREIESKYLDYCESLTKVKIVPVGAPFQDPLTEDIYDQELIKWLDSKPENSVVYVSFGSEYFLSKEQMEEIAFGLELSGANFIWVARFPKGEEQNLEEVLPKGFLERVGERGRVLDHLVPQAHILNHRATGGFISHCGWNSVMESIDFGVPIIAMPMQWDQPINARLLVELGVAVEIKRNEDGKIEREEIAKVIKDVIFGKTGENLRAKVKELAEKMRKKRDEEIDEAAQELLQLCRNRRALK

SEQ ID NO: 563 - protein, 440 aa, synthetic construct
QKQRVLMFPWLALGHVNPFLRIAKKLADRGFHIYLSSTPINLNLTKKRIPEKYSNSIELVEYHLPELPELPPHLHTTNGLPPHLNGTLHKALAMAAPRFSEQVRNLKPDLVIYDFLIPWAEAIAASQNVPAVPLLTSGAALFSYFFNFLKKPGHEFPFEAIRLSKREQDKMREMFGTEPTELDFLVPANAGIMLICTSREIEAKYIDYCSSLSEVKVVPVGAPFQDPLTEDIYDEELIKWLDTKKPNSVVYVSFGSEYFLSKEEMEEVAFGLELSNQNFIWVARFPKGEEQNLEEVLPKGFLERIGERGRVLDHLVPQAHILGHPSTGGFVSHCGWNSVMESIHFGVPIIAMPMQWDQPINARLLVELGVAVEIKRDEDGKIHREEIAKVIKEVISGEIGEKLRKKVKELSEKMRAKEEEEMNAAAEELLQLCRNRRALK

SEQ ID NO: 564 - protein, 440 aa, synthetic construct
QKLRVVMFPWLGLGHVNPFLRLAMKLADRGFVIYLVSTPINLSMIKKRIPEKYSDSIQLVELHLPELPELPPHYHTTNGLPPHLNKTLHRALKMSSPNFSKILDTLKPDLVIYDFLVLWAEKVANSRNIPAVRLLTSGAALFSYFFNFLKRPGEEFPFEEIRLSKREQDKMREMFGTEPPEEDFLAPAQAGIMLICTSREIEAKYIDYCTELSGTKVVPVGPPFQDPLTEDIDDPELMNWLNSKPENSVVYVSFGSEAFLSKEEMEEVAYGLELSNVNFIWVARFPKGEEQDLEKVLPKGFLERVGERGRVLDHLVPQAHILSHPATGGFVSHCGWNSVMESIKFGVPIIAMPMQWDQPINARLMVELGVAVEVERDEDGKIHREEIAKVLKDVIFGKTGEELRKKVKEISEKLRSKEDEEIDGAVEELRQLCRNRNAYK

SEQ ID NO: 565 - protein, 440 aa, synthetic construct
QKLRVVMFPWLGLGHVNPFLRLAKQLADRGFHIYLVSTAINLNMIKKRIPEKYSNSIELVELHLPELPELPPHYHTTNGLPPHLNKTLHKALKMSAPNFSKILQTLKPDLVIYDFLVPWAAKVAASQGIPAVPLLTSGAALFSYFFNFLKRPGEEFPFEEIRLSKREQDKMREMFGTEPPEEDFLAPAQAGIVLICTSREIEAKYIDYCSVLLNTKVVPVGPPFQDPLTEDIDDPELMKWLDTKEENSVVYVSFGSEAFLSREEMEEVAHGLELSGVNFIWVARFPKGEEQNLEEVLPKGFLERVGERGVVLDHLVPQAHILSHPSTGGFVSHCGWNSVMESIRFGVPIIAMPMQWDQPINARLLVELGVAVEVERDEDGRVHREEIAKVLKGVIFGEVGESLRKKVKELSEKLKAKGEEEMDGAAQELIQLCRNRNAYK

SEQ ID NO: 566 - protein, 440 aa, synthetic construct
QTLRVVMFPWLGLGHVNPFLRIAKKLADRGFYIYLVSTPINLEMIKKRIPEKYSHSIELVELHLPELPELPPHYHTTNGLPPHLNKTLHKALKMSKPNFSKILQTIKPDLVIYDFLVPWAEKAASEQDIPAVPLLTSGAALFSYFFNFLKRPGEEFPFEAIRLSKREQDKMREMFGTEPPEEDFLAPAKAGIMLMCTSREIEAKYIDYCTELTGTKIVPVGPPFQDPLTEDIDDPELMKWLDSKPEYSTVYVSFGSEAFLSKEEMTEVAYGLELSNANFIWVARFPKGEEKNLEDVLPEGFLERVGERGRVLDHLVPQAHILNHPSTGGFISHCGWNSVMESIDFGVPIIAMPMQWDQPINARLLVEVGVAVEIPRDEDGKIHRAEIAKVIKNVIFGEIGEELRKKVKELSNRLKEKKDEEMDGAAQELIQLCRNRNAYK

SEQ ID NO: 567 - protein, 440 aa, synthetic construct
QKIRVLMFPWLALGHVNPFLRIAKQLADRGFVIYLVSTPINLNLTKKRIPYKYSNSIHLVEFHLPELPELPPHLHTTNGLPPHLNGTLHKALNMSKPRFSQIIQDLKPDLVIYDFLIPWAESVALSQNVPGVPLLTSGAALFSYFFNFLKKPGVEFPFEAIRLSKREQDKMREMFGTEPTELDFLVPANAGIMLICTSREIEAKYLDYCSSLSEVKVVPVGAPFQDPLTEDIYDEELIKWLDTKEESSVVYVSFGSEYFLSKEEMEEVAYGLELSGVNFIWVARFPKGEEQNLEEVLPKGFLERIGDRGRVLDHLVPQAHILGHKSTGGFVSHCGWNSVMESIDFGVPIIAMPMQWDQPINARLLVEIGVAVEIKRDEDGKIHRDEIAKVLKDVIFGPIGEVLRKKVKELSLKMRAKEEEEMDGAAEELRQLCRNRRALK

SEQ ID NO: 568 - protein, 440 aa, synthetic construct
QTIRVLMFPWLALGHVNPFLRIAKKLADRGFHIYLVSTAINLELAKKRIPPKYSSSIELVEFALPELPELPPHLHTTNGLPPHLNGTLHKALEMSKPKFSDIIKTLKPDLVIYDFLIPWAESVASSQNVPGVPLLTSGAALFSYFFNFLKKPGVEFPFPEIRLSKREQDKMREMFGTEPTELDFLVPANAGIMLICTSREIEAKYIDYCQSLSEVKVIPVGAPFQDPLTEDIYDEELIRWLDTKEPNSVVYVSFGSEYFLSKEEMEEVAFGLELSGVNFIWVARFPKGEEQNLEEVLPKGFLERVGERGRVLDHLVPQAHILGHRSTGGFVSHCGWNSVMESIHFGVPIIAMPMQWDQPINARLLVEVGVAVEIKRDEDGKIHREEIAKVLKDVIFGKTGEILRAKVKELAEKMKAREEEEMDAAAEELRQLCRNRRALK

SEQ ID NO: 569 - protein, 440 aa, synthetic construct
QKIKVLMFPWLALGHVNPFLRIAKRLADRGFEIYLVSTAINLNLAKKRIPPKYSSSIHLVEYKLPELPELPPHLHTTNGLPPHLNGTLHKALNMSRPRFSELVRELKPDLVVYDFLIPWAEAVAASHGVPGVPLLTSGAALFSYFFNFLKKPGIEFPFPEIRLSKREQDKMREMFGTEPTELDFLVPANAGIMLVCTSRVIEAKYLDYCHSLTGVKVVPVGAPFQDPLTEDIYDDELMTWLDTKKPNSVVYVSFGSEYFLSREDMEEVAYGLELSNQNFIWVARFPKGEEQNLEDVLPKGFLERVGDRGRVLDHLVPQAHILNHESTGGFMSHCGWNSVMESIHFGVPIIAMPMQWDQPINARLLVEVGVAVEVRRDEDGRIHRGEIAEVIKEVIAGEKGEELRRNVRKIADNLRKRDEEEMNGAAEELKKLCRNRRALK

SEQ ID NO: 570 - protein, 440 aa, synthetic construct
QKFKVLMFPWLALGHVNPFLRIAKRLADRGFLIYLSSTAINLNLAKKRIPDKYSSSIQLVEYNLPELPELPPHLHTTNGLPPHLNGTLHKALNMSNPNFSNLVRNLKPDLVVYDFLIPWAEAVAAAQGVPGVPLLTSGAALFSYFFNFLKKPGIEFPFPEIRLSKREQDKMREMFGTEPTELDFLVPANAGIMLVCTSRVIEAKYLDYCHSLTGVKVIPVGAPFQDPLTEDIYDDELIRWLDTKKPNSVVYVSFGSEYFLSREQMEEIAYGLELSGVNFIWVARFPKGEEQNLEDVLPKGFLERVGDRGRVLDHLVPQAHILNHESTGGFISHCGWNSVMESIHFGVPIIAMPMQWDQPINARLLVEIGVAVEIRRDEDGNIHRDEIAEVLKEVIFGEIGEKLRERVRKIAKNLRERGEEEMNGAAEELAQLCRNRRALK

SEQ ID NO: 571 - protein, 440 aa, synthetic construct
QTITVLMFPWLALGHVNPFLRIAKRLADRGFKIYLSSTAINLDLTKKRIPKKYSNSIQLVEYQLPELPELPPHLHTTNGLPPHLNGTLHKALNMSKPRFSDLIRELKPDLVVYDFLIPWAELVAESLGVPGVPLLTSGAALFSYFFNFLKRPGHEFPFPAIRLSKREQDKMREMFGTEPTELDFLVPANAGIMLVCTSREIERKYLDYCHSLTNVKVIPVGAPFQDPLTEDIYDDELISWLNTKKPNSTVYVSFGSEYFLSREQMEEVAFGLELSGVNFIWVARFPKGEEQNLEEVLPKGFLERIGDRGRVLDHLVPQAHILAHSSTGGFLSHCGWNSVMESIYFGVPIIAMPMQWDQPINARLLVELGVAVEIRRDEDGRIHRGEIARVLKEVILGETGEVLRRRVRDLAERLRERDEEEMNGAAEELKKLCRNRRALK

SEQ ID NO: 572 - protein, 440 aa, synthetic construct
QTLRVTMFPWLGLGHVNPFLRIAKQLADRGMVIYVVSTPVNLEMIKKRIPEKYADSIHLVELRLPELPELPPHYHTTNGLPPHLNKTLHKAFKMSAPNFSRILQNIKPDLLLYDFLVPWAEKVALEQNVPAVRLLTSGAALFAYVFNFLTRPGEEFPFEAIRLPKVEQPKMREMMGTEPPEEDFLAPAQKGIMLMCTSRVIEAKYLDYCQKLTNVKVVPVGPPFQDPDTMDIDKPELMDWLDTKPEHSTVYVSFGSEAFLSREDMEEVAFGLEISGVDFIWVARFPKGEEQRLEDVLPKGFLERVGDRGRVLDHLVPQAKILNHPSTGGFISHCGWNSVMESIDFGVPIIAMPMQWDQPINAKLLVELGVAVRIPRDEDGKVHRAEIARVLKDVISEPTGEKLRAKVRDIAARLRARREEEMNAAAEELIQLHRKRNAYV

SEQ ID NO: 573 - protein, 440 aa, synthetic construct
QTLRVTMFPWLGLGHVNPFLRIAKQLADRGMVIYVVSTPVNLEMAKKRIPEKYADSIHLVELRLPELPELPPHYHTTNGLPPHLNKTLHKALKMSAPNFSKILQNIKPDLLLYDFLVPWAEKVALEQNVPAVRLLTSGAALFAYVFNFLTRPGEEFPFEAIRLPKREQPQMREMMGTEPPEEDFLAPAQKGIMLMCTSRVIEAKYLDYCQKLTNVKVVPVGPPFQDPDTMDVDKPELMDWLDTKPEHSVVYVSFGSEAFLSREDMEEVAFGLEISGVDFIWVARFPKGEEQRLEDVLPKGFLERIGDRGRVLDHLVPQAKILNHPSTGGFISHCGWNSVMESIDFGVPIIAMPMQWDQPINAKLMVELGVAVRIPRDEDGKVHRAEIARVLKDVISEPTGEKLRAKVRDIAARLRARREEEMNAAAEELIQLHRKRNAYV

SEQ ID NO: 574 - protein, 440 aa, synthetic construct
QTLQVTMFPWLGLGHVNPFLRIAKQLADRGMVIYLVSTAVNLEMARKRIPEKYANSIHLVELRLPELPELPSHLHTTNGLPPHLNKTLHKALKMSAPNFSKILQNIKPTLVLYDFLVPWAEKSALSQGIPAVPLLTSGAALFAYVFNHLTRPGEEFPFEAIRLPKREQPKMYEMFATEPPEEDFLDKAQAGIMLMCTSRVIEAKYLDYCQKLTNVKVVPVGPPFQDPLTEDVDDPELMRWLDTKPEHSTVYVSFGSEAFLSREDMEEVAFGLEISGVNFIWVARFPKGEEQRLEDVLPRGFLERVGDRGRVRDHLVPQAHILNHPSTGGFISHCGWNSVMESIDFGVPIIAMPMQWDQPINARLLVELGVAVEIPRREDGRVHRAEIARVLKDVISGETGEKLRANVRDLSARLRARREEEMNAAAEELLQLHRNRLAYK

SEQ ID NO: 575 - protein, 440 aa, synthetic construct
QNLQVTMFPWLGLGHINPFLRIAKQLADRGMVIYLVSTAVNLEMIRKRIPEKYANSIHLVELRLPELPELPSHYHTTNGLPPHLNKTLHKALKMSAPNFSKILQNINPDLVLYDFLVPWAEKVALEQGVPAVPLLTSGAALFAYVFNHLTRPGEEFPFEAIRLSEVEQPQLREMFGTEPPEEDFLAKAQAGIMLMCTSRVIEAKYLDYCTKLTNVKVVPVGPPFQDPDTEDVDDPELMRWLDTKPEHSVVYVSFGSEAFLSREDMEEVAFGLEISGVNFIWVARFPKGEEQRLEDVLPRGFLERVGDRGRVLDHLVPQAHILNHPSTGGFISHCGWNSVMESIDFGVPIIAMPMQWDQPINARLMVELGVAVEIPRREDGRVHRAEIARVLRDVISGETGEKLRANVADIAARLRARREEEMNAAAEALLQLCRKRLAYV

SEQ ID NO: 576 - protein, 440 aa, synthetic construct
QTLQVTMFPWLGLGHVNPFLRIAKQLADRGMVIYVVSTAVNLEMAKKRIPEKYANSIHLVELRLPELPELPPHLHTTNGLPPHLNKTLHKALKMSAPNFSKILQNINPTLVLYDFLVPWAEKSALSQGVPAVPLLTSGAALFAYFFNHLKRPGEEFPFEAIRLPEREQPQMYEMFATEPPEEDFLAKAQAGIMLMCTSRVIEAKYLDYCTKLTNVKVVPVGPPFQDLDTEDVDDPELMRWLDTKPEHSTVYVSFGSEAFLSREDMEEVAFGLELSGVNFIWVARFPKGEEQRLEDVLPRGFLERVGDRGRVRDHLVPQAHILNHPSTGGFISHCGWNSVMESIDFGVPIIAMPMQWDQPINARLLVELGVAVEIPRREDGRVHRAEIARVLRDVISGPTGEKLRANVADIAARLRARREEEMNAAAEELLQLHRNRNAYV

SEQ ID NO: 577 - protein, 440 aa, synthetic construct
QNLQVTMFPWLGLGHVNPFLRIAKQLADRGMVIYVVSTAINLEMIRKRIPEKYSNSIHLVELRLPELPELPSHLHTTNGLPPHLNKTLHKALKMSAPNFSKILQNINPDLVLYDFLVPWAEKVALSQGVPAVPLLTSGAALFAYVFNHLTRPGEEFPFEAIRLPKVEQPQLYEMFATEPPEEDFLDKAQAGIMLMCTSRVIEAKYLDYCQKLTNVKVVPVGPPFQDLDTEDVDDPELMRWLDTKPEHSTVYVSFGSEAFLSREDMEEVAFGLELSGVNFIWVARFPKGEEQRLEDVLPKGFLERVGDRGRVRDHLVPQAHILNHPSTGGFISHCGWNSVMESIDFGVPIIAMPMQWDQPINARLMVELGVAVEIPRREDGRVHRAEIARVLKDVISGPTGEILRANVRDIAARLRARREEEMNAAAEALLQLCRKRNAYV

SEQ ID NO: 578 - protein, 440 aa, synthetic construct
QTLRVTMFPWLGLGHVNPFLRIAKQLADRGMVIYVVSTPVNLEMIRKRIPEKYADSIHLVELRLPELPELPPHYHTTNGLPPHLNKTLHKAFKMSAPNFSRILQNIKPDLLLYDFLVPWAEKVALEQNVPAVRLLTSGAALFAYVFNFLTRPGEEFPFEAIRLPKREQPQMREMMGTEPPEEDFLAPAQKGIMLMCTSRVIEAKYLDYCTELTNVKVVPVGPPFQDPDTMDVDKPELMRWLDTKPEHSTVYVSFGSEAFLSREDMEEVAFGLEISGVDFIWVARFPKGEEQRLEDVLPKGFLERVGDRGRVLDHLVPQAKILNHPSTGGFISHCGWNSVMESIDFGVPIIAMPMQWDQPINAKLLVELGVAVRIPRDEDGRVHRAEIARVLKDVISEPTGEKLRAKVRDIAARLRARREEEMNAAAEELIQLHRKRNAYV

SEQ ID NO: 579 - protein, 440 aa, synthetic construct
QTLRVTMFPWLGLGHVNPFLRIAKQLADRGMVIYVVSTPVNLEMIRKRIPEKYADSIHLVELRLPELPELPPHYHTTNGLPPHLNKTLHKAFKMSAPNFSKILQNIKPDLLLYDFLVPWAEKVALEQGVPAVRLLTSGAALFAYVFNFLTRPGEEFPFEAIRLPKREQPQMREMMGTEPPEEDFLDPAQKGIMLMCTSRVIEAKYLDYCTELTNVKVVPVGPPFQDPLTMDDDKPELMDWLDTKPEHSTVYVSFGSEAFLSREDMEEVAFGLEISGVDFIWVARFPKGEEQRLEDVLPKGFLERVGDRGRVLDHLVPQAKILNHPSTGGFISHCGWNSVMESIDFGVPIIAMPMQWDQPINAKLLVELGVAVRIPRREDGKVHRAEIARVLKDVISEPTGEKLRAKVRDIAARLRARREEEMNAAAEELIQLHRKRNAYV

SEQ ID NO: 580 - protein, 440 aa, synthetic construct
QTLRVTMFPWLGLGHVNPFLRIAKQLADRGMVIYVVSTPVNLEMIKKRIPEKYADSIHLVELRLPELPELPPHYHTTNGLPPHLNKTLHKAFKMSAPNFSKILQNIKPDLLLYDFLVPWAEKVALEQNVPAVRLLTSGAALFAYVFNFLTRPGEEFPFEAIRLPKVEQPKMREMMGTEPPEEDFLAPAQKGIMLMCTSRVIEAKYLDYCQKLTNVKVVPVGPPFQDPDTMDVDKPELMDWLDTKPEHSTVYVSFGSEAFLSREDMEEVAFGLEISGVDFIWVARFPKGEEKRLEDVLPKGFLERVGDRGRVLDHLVPQAKILNHPSTGGFISHCGWNSVMESIDFGVPIIAMPMQWDQPINARLMVELGVAVRIPRDEDGKVHRAEIARVLKDVISEPTGEKLRAKVRDIAARLRARREEEMNAAAEELIQLHRKRNAYV

SEQ ID NO: 581 - protein, 440 aa, synthetic construct
QTLRVTMFPWLGLGHVNPFLRIAKQLADRGMVIYVVSTPVNLEMAKKRIPEKYADSIHLVELRLPELPELPPHYHTTNGLPPHLNKTLHKALKMSAPNFSKILQNIKPDLLLYDFLVPWAEKVALEQGVPAVRLLTSGAALFAYVFNFLTRPGEEFPFEAIRLPKVEQPQMREMMGTEPPEEDFLAPAQKGIMLMCTSRVIEAKYLDYCTELTNVKVVPVGPPFQDPDTMDDDKPELMRWLDTKPEHSTVYVSFGSEAFLSREDMEEVAFGLEISGVDFIWVARFPKGEEQRLEDVLPKGFLERIGDRGRVLDHLVPQAKILNHPSTGGFISHCGWNSVMESIDFGVPIIAMPMQWDQPINAKLMVELGVAVRIPRREDGKVHRAEIARVLKDVISEPTGEILRAKVRDIAARLRARREEEMNAAAEELIQLHRKRNAYV

SEQ ID NO: 582 - protein, 440 aa, synthetic construct
QTLRVTMFPWLGLGHVNPFLRIAKQLADRGMVIYVVSTPVNLEMIKKRIPEKYADSIHLVELRLPELPELPPHYHTTNGLPPHLNKTLHKALKMSAPNFSKILQNIKPDLLLYDFLVPWAEKVALSQNVPAVRLLTSGAALFAYVFNFLTRPGEEFPFEAIRLPEREQPQMREMMGTEPPEEDFLDPAQKGIMLMCTSRVIEAKYLDYCTKLTNVKVVPVGPPFQDPDTMDVDKPELMDWLDTKPEHSTVYVSFGSEAFLSREDMEEVAFGLEISGVDFIWVARFPKGEEQRLEDVLPKGFLERVGDRGRVLDHLVPQAKILNHPSTGGFISHCGWNSVMESIDFGVPIIAMPMQWDQPINAKLLVELGVAVRIPRDEDGKVHRAEIARVLKDVISEPTGEILRAKVRDIAARLRARREEEMNAAAEELIQLHRKRNAYV

SEQ ID NO: 583 - protein, 440 aa, synthetic construct
QNLRVTMFPWLGLGHINPFLRIAKQLADRGMVIYVVSTAVNLEMIRKRIPEKYSNSIHLVELRLPELPELPSHLHTTNGLPPHLNKTLHKALKMSAPNFSKILQNINPDLVLYDFLVPWAEKSALSQGVPAVPLLTSGAALFAYVFNFLTRPGEEFPFEAIRLPEREQDQMYEMFATEPPEEDFLDKAQAGIMLMCTSRVIEAKYLDYCQKLTNVKVVPVGPPFQDPDTEDVDDPELMRWLDTKPEHSTVYVSFGSEAFLSREDMEEVAFGLEISGVNFIWVARFPKGEEQRLEDVLPRGFLERVGDRGRVLDHLVPQAHILNHPSTGGFISHCGWNSVMESIDFGVPIIAMPMQWDQPINARLLVELGVAVEIPRDEDGRVHRAEIARVLKDVISGETGEKLRANVADIAARLRARREEEMNAAAEELLQLCRKRLAYV

SEQ ID NO: 584 - protein, 440 aa, synthetic construct
QTLRVTMFPWLGLGHVNPFLRIAKQLADRGMVIYVVSTPVNLEMIRKRIPEKYADSIHLVELRLPELPELPPHYHTTNGLPPHLNKTLHKALKMSAPNFSKILQNIKPDLLLYDFLVPWAEKVALEQNVPAVRLLTSGAALFAYVFNFLTRPGEEFPFEAIRLPEVEQPQMREMMGTEPPEEDFLDPAQKGIMLMCTSRVIEAKYLDYCTELTNVKVVPVGPPFQDPDTMDDDKPELMRWLDTKPEHSTVYVSFGSEAFLSREDMEEVAFGLEISGVDFIWVARFPKGEEQRLEDVLPKGFLERIGDRGRVLDHLVPQAKILNHPSTGGFISHCGWNSVMESIDFGVPIIAMPMQWDQPINAKLMVELGVAVRIPRREDGRVHRAEIARVLKDVISEPTGEILRAKVRDIAARLRARREEEMNAAAEELIQLHRKRNAYV

SEQ ID NO: 585 - protein, 440 aa, synthetic construct
QTLQVTMFPWLGLGHINPFLRIAKQLADRGMVIYVVSTAVNLEMIRKRIPEKYSNSIHLVELRLPELPELPSHYHTTNGLPPHLNKTLHKALKMSAPNFSKILQNINPTLVLYDFLVPWAEKVALSQGVPAVPLLTSGAALFSYVFNHLTRPGEEFPFEAIRLPEVEQPQLYEMFGTEPPEEDFLDKAQAGIMLMCTSRVIEAKYLDYCTKLTNVKVVPVGPPFQDLDTEDIDDPELMRWLDTKPEHSVVYVSFGSEAFLSREDMEEVAFGLEISGVNFIWVARFPKGEEQRLEDVLPRGFLERVGDRGRVRDHLVPQAHILNHPSTGGFISHCGWNSVMESIDFGVPIIAMPMQWDQPINARLMVELGVAVEIPRREDGRVHRAEIARVLKDVISGETGEKLRANVRDLAARLRARREEEMNAAAEALIQLHRNRLAYV

SEQ ID NO: 586 - protein, 440 aa, synthetic construct
QNLQVTMFPWLGLGHINPFLRIAKQLADRGMVIYVVSTAINLEMARKRIPEKYANSIHLVELRLPELPELPPHYHTTNGLPPHLNKTLHKALKMSAPNFSKILQNINPDLVLYDFLVPWAEKSALEQGVPAVPLLTSGAALFAYVFNFLTRPGEEFPFEAIRLPKVEQPQLREMFGTEPPEEDFLDKAQAGIMLMCTSRVIEAKYLDYCQKLTNVKVVPVGPPFQDPLTEDVDDPELMRWLDTKPEHSVVYVSFGSEAFLSREDMEEVAFGLEISGVNFIWVARFPKGEEQRLEDVLPKGFLERVGDRGRVRDHLVPQAHILNHPSTGGFISHCGWNSVMESIDFGVPIIAMPMQWDQPINARLLVELGVAVEIPRREDGRVHRAEIARVLRDVISGETGEKLRANVADIAARLRARREEEMNAAAEALLQLHRKRNAYV

SEQ ID NO: 587 - protein, 440 aa, synthetic construct
QNLRVTMFPWLGLGHVNPFLRIAKQLADRGMVIYVVSTPVNLEMIRKRIPEKYADSIHLVELRLPELPELPPHYHTTNGLPPHLNKTLHKALKMSAPNFSKILQNIKPDLLLYDFLVPWAEKVALEQGVPAVRLLTSGAALFAYVFNFLTRPGEEFPFEAIRLPKREQPQMREMMGTEPPEEDFLDPAQKGIMLMCTSRVIEAKYLDYCQKLTNVKVVPVGPPFQDPDTMDVDKPELMDWLDTKPEHSTVYVSFGSEAFLSREDMEEVAFGLEISGVDFIWVARFPKGEEQRLEDVLPKGFLERIGDRGRVLDHLVPQAKILNHPSTGGFISHCGWNSVMESIDFGVPIIAMPMQWDQPINAKLMVELGVAVRIPRDEDGRVHRAEIARVLKDVISEPTGEKLRAKVRDIAARLRARREEEMNAAAEALIQLHRKRNAYV

SEQ ID NO: 588 - protein, 440 aa, synthetic construct
QTLQVTMFPWLGLGHINPFLRIAKQLADRGMVIYVVSTPVNLEMIRKRIPEKYADSIHLVELRLPELPELPPHYHTTNGLPPHLNKTLHKAFKMSAPNFSKILQNIKPDLLLYDFLVPWAEKVALEQNVPAVRLLTSGAALFAYVFNFLTRPGEEFPFEAIRLPKREQPQMREMMGTEPPEEDFLAPAQKGIMLMCTSRVIEAKYLDYCQKLTNVKVVPVGPPFQDPDTMDVDKPELMRWLDTKPEHSTVYVSFGSEAFLSREDMEEVAFGLEISGVDFIWVARFPKGEEQRLEDVLPKGFLERVGDRGRVLDHLVPQAKILNHPSTGGFISHCGWNSVMESIDFGVPIIAMPMQWDQPINAKLLVELGVAVRIPRDEDGRVHRAEIARVLKDVISEPTGEKLRAKVRDIAARLRARREEEMNAAAEELIQLHRKRNAYV

SEQ ID NO: 589 - protein, 440 aa, synthetic construct
QNLQVTMFPWLGLGHINPFLRIAKQLADRGMVIYVVSTAVNLEMARKRIPEKYSNSIHLVELRLPELPELPSHLHTTNGLPPHLNKTLHKALKMSAPNFSKILQNINPDLVLYDFLVPWAEKSALEQGVPAVPLLTSGAALFSYVFNHLKRPGEEFPFEAIRLPEREQPQLYEMFATEPPEEDFLAKAQAGIMLMCTSRVIEAKYLDYCQKLTNVKVVPVGPPFQDPLTEDIDDPELMRWLDTKPEHSTVYVSFGSEAFLSREDMEEVAFGLELSGVNFIWVARFPKGEEQRLEDVLPKGFLERVGDRGRVRDHLVPQAHILNHPSTGGFISHCGWNSVMESIDFGVPIIAMPMQWDQPINARLMVELGVAVEIPRREDGRVHRAEIARVLRDVISGPTGEKLRANVADLAARLRARREEEMNAAAEALLQLHRKRNAYV

SEQ ID NO: 590 - protein, 440 aa, synthetic construct
QTLQVTMFPWLGLGHVNPFLRIAKQLADRGMVIYVVSTPVNLEMAKKRIPEKYADSIHLVELRLPELPELPPHYHTTNGLPPHLNKTLHKAFKMSAPNFSRILQNIKPDLLLYDFLVPWAEKVALEQNVPAVRLLTSGAALFAYVFNFLTRPGEEFPFEAIRLPEREQPQMREMMGTEPPEEDFLAPAQKGIMLMCTSRVIEAKYLDYCQKLTNVKVVPVGPPFQDPDTMDIDKPELMDWLDTKPEHSTVYVSFGSEAFLSREDMEEVAFGLEISGVDFIWVARFPKGEEQRLEDVLPKGFLERIGDRGRVLDHLVPQAKILNHPSTGGFISHCGWNSVMESIDFGVPIIAMPMQWDQPINAKLLVELGVAVRIPRREDGKVHRAEIARVLKDVISEPTGEILRAKVRDIAARLRARREEEMNAAAEELIQLHRKRNAYV

SEQ ID NO: 591 - protein, 440 aa, synthetic construct
QTLRVTMFPWLGLGHVNPFLRIAKQLADRGMVIHVVSTPVNLNMIKKRIPEKYSDSIQLVEYRLPELPELPSHYHTTNGLPPHLNGTLHKALKMSAPEFSKQVQNLKPDLVLYDFLIPWAEKVALEQNVPGVKLLTSGAALFAYFFNFVTKPGEEFPFPAIRLSKREQDKMREMFGTEPTDDDFLAEAQNGIMLMCTSRIIEAKYIDYCTKLMNWKVVPVGPPFQDPLTEDISDPELIDWLDTKPPHSTVYVSFGSEAFLSKEDMEEIAFGLELSNVNFIWVARFPKGEEQRLEEVLPKGFLERIGERGRVLDHLVPQAHILNHKSTGGFISHCGWNSVMESIDFGVPIIAMPMQWDQPINARLLVELGVAVEIRRQEDGRIHRDAIAQVLKDVIVGPTGENLRAKVRDIAARLRARREEEMTIAAEELIQLHQKRRAYV

SEQ ID NO: 592 - protein, 440 aa, synthetic construct
QTLRVTMFPWLGLGHVNPFLRIAKQLADRGMVIHVCSTPVNLNMIKKRIPEKYSDSIQLVEYHLPELPELPPHYHTTNGLPPHLNGTLHKALQMSAPEFSKQVQNIKPDLLIYDFLIPWAEKVALEQGVPGVKLLTSGAALFAYFFHFVTKPGEEFPFPAIRLSKREQDKMREMFGTEPTEDDFLVPANNGIMLMCTSRVIEAKYIDYCTKLMNWKVVPVGPPFQDPLTEDIYDKELIRWLDTKPEHSTVYVSFGSEAFLSKEDMEEIAFGLELSNVNFIWVARFPKGVEQRLEEVLPKGFLERVGDRGRVLDHLVPQAHILNHPSTGGFVSHCGWNSVMESIDFGVPIIAMPMQWDQPINARLIVELGVAVEIRRQENGKIHRDAIARVIKDVIVGKTGEILRAKVRDIAANLRARREEEMNAAAEELIQLHQKRNAYV

SEQ ID NO: 593 - protein, 440 aa, synthetic construct
STLRVTMFPWLGLGHVNPFLRIAKQLADRGMVIYVCSTPVNLNMAKKRIPEKYSDSIQLVELRLPELPELPSHYHTTNGLPPHLNGTLHKALKMSAPEFSKQVQNIKPDLLIYDFLIPWAEKVALEQNIPAVPLLTSGAALFAYFFHFVTKPGEEFPFPAIRLSKREQDKMREMFGTEPTDDDFLVPANNGIMLMCTSRIIEAKYIDYLQKLMNWKVVPVGPPFQDPLTEDISDPELIDWLDTKPENSVVYVSFGSEAFLSKEDMEEIAFGLELSNVNFIWVARFPKGVEQRLEEVLPKGFLERVGDRGRVLDHLVPQAHILNHKSTGGFVSHCGWNSVMESIDFGVPIIAMPMQWDQPINARLIVELGVAVEIRRQEDGRVHRDAIAQVIKDVIVGPTGENLRAKVRDIAANLRARREEEMTIAAEELIQLHQKRRAYV

SEQ ID NO: 594 - protein, 440 aa, synthetic construct
QTLRVTMFPWLALGHVNPFLRIAKKLADRGMVIYVCSTPVNLNMIKKRIPEKYSDSIQLVELRLPELPELPPHYHTTNGLPPHLNGTLHKALQMSAPEFSKIVQNIKPDLLIYDFLVPWAEKVALSQNIPGVKLLTSGAALFAYFFHFLTKPGEEFPFEAIRLSKREQDKMREMFGTEPTEEDFLVPANNGIMLMCTSRVIEAKYIDYLQKLMNWKVVPVGPPFQDPLTEDIYDPELIDWLDTKPEHSTVYVSFGSEAFLSKEDMEEIAFGLELSNVNFIWVARFPKGVEQRLEEVLPKGFLERIGDRGRVLDHLVPQAHILNHKSTGGFISHCGWNSVMESIDFGVPIIAMPMQWDQPINARLLVELGVAVEIPRQEDGKIHRDAIAQVIKDVIVGKTGEKLRANVRDIAERLKARRDEEMTIAAEELIQLHQKRRALV

SEQ ID NO: 595 - protein, 440 aa, synthetic construct
QTQRVTMFPWLGLGHVNPFLRLAKQLADRGFTIYLVSTAIVLEMIKKRITEKYSNSIHLVELRLPELPELPPYLHTTNGLPPHLNPTLHKALKMSSPEFSKILQAIKPDLVCYDLLVPWAEKISVEQKIPAVPLLTSGAALYSYFFNVLKRPGEEFPFEAIRLSKSEQDKMREMLGTEPTEEDFLPPQNAPIMLMCTSRVIEAKYLDYLTDLTNVKVVPVGASFQDPLTEDIDDPELMDWLDTKREHSVVYVSFGSEYFLSREDMEEVAFGLELSGVNFIWVARFPKGEEQHLEDVLPEGFLERVGDRGRVRDKLVPQLHILNHPSTGGFLSHCGWNSVMESIDFGVPIIAMPMQWDQPINARLLVELGVAVEIMRDEEGRIHRHEIMRVLKDVIHGPTGEILRANVRDISALLRSWREEEMNIAAETLIRLGRKLAAHK

SEQ ID NO: 596 - protein, 440 aa, synthetic construct
LTLRVLMFPWLGLGHVNPFLRIAKQLADRGFVIYLVSTAIVLEMIKKRIPEKYSNSIHLVELRLPELPELPPYLHTTNGLPPHLNKTLHKALKMSSPEFSKILQAIKPDLVLYDFLVPWAEKIALEQKIPAVPLLTSGAALYSYFFNVLKRPGEPFPFEAIRLSKSEQDKLREMLGTVPPEEDFLAVAQAPIMLMCTSRVIEAKYLDYCADLTNVKVVPVGATFMDPLTEDIDDPELMDWLDTKREHSVVYVSFGSEAFLSREDMEELAFSLELSGVNFIWVARFPKGEEQHLEDVLPEGFLERVGDRGRVRDKLVPQLHILNHPSTGGFLSHCGWNSVMESIDFGVPIIAMPMQWDQPINARLLVELGVAVEIMRDEEGRIHRHEIAKCLKDVIMGPTGEILRANVRDIGALLRSWREEEMNIAAEALMALHRNLSAYK

SEQ ID NO: 597 - protein, 440 aa, synthetic construct
QTQRVTMFPWLGLGHVNPFLRIAKQLADRGMTIYLVSTAIVLEMIKKRIPEKYSNSIHLVELRLPELPELPPHLHTTNGLPPHLNGTLHKALKMSSPEFSKILQAIKPDLVLYDLLVPWAEKIALEQKIPAVPLLTSGAALYSYFFQVLKRPGEPFPFEAIRLSKREQDKMREMLGTVPPEEDFLPVQNAPIMLMCTSRVIEAKYLDYCAELTNVKVVPVGASFMDPLTEDIDDPELMDWLDTKREHSVVYVSFGSEAFLSCEDMEELAFGLELSGVNFIWVARFPKGEEQHLEDVLPEGFLERVGDRGRVLDHLVPQLHILNHPSTGGFLSHCGWNSVMESIDFGVPIIAMPMQWDQPINARLLVELGVAVEISRDEEGRIHRHEIMKVLKDVIQGPTGEILRANVRDIGARLRASREEEMTIAALALIRLCRKLAAHK

SEQ ID NO: 598 - protein, 440 aa, synthetic construct
QTQRVLMFPWLGLGHVNPFLRIAKQLADRGFTIYLVSTAIVLEMIAKRITEKYSNSIHLVELRLPELPELPPYLHTTNGLPPHLNPTLHKALKMSSPEFSKILQAIKPDLVLYDFLVPWAEKVALETKIPAVPLLTSGAALYSYFFNHLKRPGEPFPFEAIRLSKSEQDKMREMLGKVPPEEDFLVPQQAPIMLMCTSRVIEAKYLDYLTDLTNVKVVPVGPPFQDPLTEDIDDPELMDWLDTKPEHSVVYVSFGSEAFLSREDMEELAFGLELSGVNFIWVARFPKGEEQHLEDVLPEGFLERVGDRGRVRDKLVPQLHILNHPSTGGFLSHCGWNSVMESIDFGVPIIAMPMQWDQPINARLLVELGVAVEIMRDEEGRIHRHEIMKCLKDVIHGPTGEILRANVRDISALLRSWREEEMNIAALTLIRLGRNLVAYK

SEQ ID NO: 599 - protein, 440 aa, synthetic construct
QTQRVTMFPWLGLGHVNPFLRIAKQLADRGMVIYLVSTAIVLEMIAKRITEKYSNSIHLVELRLPELPELPPHLHTTNGLPPHLNKTLHKALKMSSPEFSKILQNIKPDLVLYDFLVPWAEKIAVEQKIPAVGLLTSGAALYSYFFNVLKRPGEPFPFEAIRLSKREQDKMREMLGTVPPEEDFLPVQQAPIMLMCTSRVIEAKYLDYLAELTNVKVVPVGAPFLDPLTEDIDDPELMDWLDTKREHSVVYVSFGSEAFLSREDMEEVAFSLELSGVNFIWVARFPKGEEQHLEDVLPEGFLERVGDRGRVRDKLVPQLHILNHPSTGGFLSHCGWNSVMESIDFGVPIIAMPMQWDQPINARLLVELGVAVEIMRDEEGRVHRHEIMRVVKDVISGPTGEILRANVRDISARLRSAREEEMTAAAEALIALCRNLSAYK

SEQ ID NO: 600 - protein, 440 aa, synthetic construct
QTQQATMFPWLGLGHVNPFLRIAKQLGDRGMTMYYLSTKIQLNMIKKRITEKYFNSIHLVTLSLPHLPELPPHLHTTNALPPHLNPTLHRALKMSSPEYSKNLITIRSALVVNDFLQPWSERHAVETTIPQVKLLTSGAALFSYFVTFLKRPGAPFPFEEIHLSKREQDKTLEMLGYEPPEEDPLVVQYAKIMLMCTSRVIEAKYLDYCQDLTNVKVVPVGPPFQDPMTEDIDDPELMDWLDTKPEHSTVYVSFGSEAFLSHEDLEEVAFGLELSGKPFIWVARFPKGEEQNLEDVLPNGFLERVGDRGRVRDKLVPQLHCLNHKSTSGFLSHCGWNSVLESIDFGTPIIAMPMQWDQPINSRLLGELGVCVEILRDEEGRIHHHSLAQVTKDVISGATGEILRANSADIGVLLRSARDEEMTCAADALIALHRKLAALK

SEQ ID NO: 601 - protein, 440 aa, synthetic construct
QTQRVLMFPWLALGHVNPFLRLAKQLADRGMTIELVSTAIVLEMIKKRITEKYSNSIHLVELRLPELPELPPYLHTTNGLPPHLNGTLHKALKMSSPEFSKILQAIKPDLVLYDFLVPWAEKIAVETGTPAVPVLTSGAALYSYFFQFLKRPGEPFPFPAIRLSKREQDKLREMFGTVPPEEDFLMVQNAPIMLMCTSRVIEAKYLDYLADLTNVKVVPVGAPFMDPLTEDIDDPELMRWLDTKREHSVVYVSFGSEYFLSREDMEELAFGLELAGVNFIWVARFPKGEEQHLEDVLPKGFLERVGDRGRVRDKLVPQLHILNHPSTGGFLSHCGWNSVMESIDFGVPIIAMPMQWDQPINARLLVELGVAVEIMRDEEGRVHRHEIMKCVKDVIHGPTGEILRANVRDIAALLRSAREEEMTIAAETLMALHRKLVAHK

SEQ ID NO: 602 - protein, 440 aa, synthetic construct
LTLRVTMFPWLGLGHVNPFLRIAKQLADRGFVIYLVSTAIVLEMIAKRITEKYSNSIHLVELRLPELPELPPHLHTTNGLPPHLNGTLHKALKMSSPEFSKILQAIKPDLVLYDLLVPWAEKIAVEQRTPAVPLLTSGAALYSYFFNVLKRPGEEFPFEAIRLSKREQDKLREMLGKVPPEEDFLVVQQAPIMLMCTSRVIEAKYLDYCTDLTNVKVVPVGPPFQDPLTEDIDDPELMDWLDTKREHSVVYVSFGSEAFLSREDMEELAFGLEVSGVNFIWVARFPKGEEQHLEDVLPKGFLERVGDRGRVRDKLVPQLHILNHPSTGGFLSHCGWNSVMESIDFGVPIIAMPMQWDQPINARLLVELGVAVEISRDEEGRIHRHEIMKCLKDVIMGPTGEILRANVRDISARLRSAREEEMNIAALTLIRLCRRLSAYK

SEQ ID NO: 603 - protein, 440 aa, synthetic construct
LTLRVLMFPWLGLGHVNPFLRIAKQLADRGMVIYLVSTAIVLEMIAKRITEKYSNSIHLVELRLPELPELPPHLHTTNGLPPHLNGTLHKALKMSSPEFSKILQAIKPDLVLYDFLVPWAEKIAVETKIPAVGLLTSGAALYSYFFQVLKRPGEPFPFEAIRLSKSEQDKLREMLGKVPPEEDFLVPQNAPIMLMCTSRVIEAKYLDYLTELTNVKVVPVGPPFLDPLTEDIDDPELIDWLDTKREHSVVYVSFGSEYFLSREDMEEVAFGLELSGVNFIWVARFPKGEEQHLEDVLPEGFLERVGDRGRVRDKLVPQLHILNHPSTGGFLSHCGWNSVMESIDFGVPIIAMPMQWDQPINSRLLVELGVAVEIMRDEEGRIHRHEIARVLKDVIMGPTGEKLRANVRDISALLRSAREEEMTAAALALIALCRNLAAYK

SEQ ID NO: 604 - protein, 440 aa, synthetic construct
QTLRVTMFPWLGLGHVNPFLRIAKQLADRGMVIYLVSTAIVLEMIAKRITEKYSNSIHLVELRLPELPELPPYLHTTNGLPPHLNGTLHKALKMSSPEFSKILQAIKPDLVLYDFLVPWAEKISVEQGIPAVPLLTSGAALYSYFFNFLKRPGEEFPFEAIRLSKSEQDKLREMLGKEPTEEDFLVPAQAPIMLMCTSRVIEAKYLDYCTELTNVKVVPVGASFMDPLTEDIDDPELMDWLDTKREHSVVYVSFGSEAFLSREDMEEVAFSLELSGVNFIWVARFPKGEEGHLEDVLPEGFLERVGDRGRVLDHLVPQLHILNHPSTGGFLSHCGWNSVMESIDFGVPIIAMPMQWDQPINARLLVELGVAVEIMRDEDGRIHRHEIMRVLKDVISGPTGEILRANVRDISALLRSAREEEMNIAALALIRLHRKLSAHK

SEQ ID NO: 605 - protein, 440 aa, synthetic construct
STLRVLMFPWLALGHVNPFLRLAKKLADRGFYIYLCNTPINLNLIKKRIPEKYSDSIQLVELHLPELPELPPHYHTTNGLPPHLNGLLKKALKMSAPTFSKILKDLKVDLLIYDFLIPWAEKVALSQNIPAVKLLTSGAALFAYFFHFVTKPGVEFPFPAIRLSKREQDKMREMFGTEPTDDDFLAEAPNQIMLMCTSRIIEAKYIDYLQKLMNWKVVPVGPPFQDPLTEDDDDKELIRWLGTKDPNSTVYVSFGSEYFLSKEQMEEIAFGLELSNVNFIWVVRFPKGEEQNLEEALPKGFLERIGERGRVLDHLVPQAHILNHKSTGGFVSHCGWNSVMESIDFGVPIIAMPMQWDQPINARLIVELGVAVEIVRDENGKIHRDEIAQVIKDVIVGKLGEKLRANVADIATNLKLIRDEEMTIAALALIKLCQNRNAYK

SEQ ID NO: 606 - protein, 440 aa, synthetic construct
STLRVLMFPWLALGHVNPFLRLAKKLADRGFYIYLCSTPINLNLIKKRIPEKYSDSIQLVELHLPELPELPPHYHTTNGLPPHLNGLLKKALKMSAPTFSKILKDLKVDLLIYDFLIPWAEKVALSQNIPAVKLLTSGAALFAYFFHFVTKPGVEFPFPAIRLSKREQDKMREMFGTEPTDDDFLAEAPNQIMLMCTSRIIEAKYIDYLQKLMNWKVVPVGPPFQDPLTEDDDDKELIRWLGTKDPNSTVYVSFGSEYFLSKEQMEEIAFGLELSNVNFIWVVRFPKGEEQNLEEALPKGFLERIGERGRVLDHLVPQAHILNHKSTGGFVSHCGWNSVMESIDFGVPIIAMPMQWDQPINARLIVELGVAVEIVRDENGKIHRDEIAQVIKDVIVGKLGEKLRANVADIAENLKLIRDEEMTIAALALIKLCQNRNAYK

SEQ ID NO: 607 - protein, 440 aa, synthetic construct
STLRVLMFPWLALGHVNPFLRLAKKLADRGFYIYLCNTPINLNLIKKRIPEKYSDSIQLVELHLPELPELPPHYHTTNGLPPHLNGTLKKALKMSAPEFSKILKNLKPDLLIYDFLQPWAEKVALSQNIPAVKLLTSGAALFSYFFHFVKKPGVEFPFPAIRLSKREQDKMREMFGTEPTDDDFLAEAPNQIMLMCTSRIIEAKYIDYLTKLMNWKVVPVGPPFQDPLTEDDDDKELIDWLGTKDENSTVYVSFGSEYFLSKEQMEEIAFGLELSNVNFIWVVRFPKGEEQNLEEALPKGFLERIGERGRVLDHLVPQAHILNHSSTGGFVSHCGWNSVMESIDFGVPIIAMPMQWDQPINARLIVELGVAVEIVRDENGKIHRDEIAQVIKDVIVGKTGEKLRAKVADIATNLKLIRDEEMDAAAEELIRLCQNRNAYK

SEQ ID NO: 608 - protein, 440 aa, synthetic construct
STLRVLMFPWLALGHVNPFLRLAKKLADRGFYIYLCSTPINLNLIKKRIPEKYSDSIQLVELHLPELPELPPHYHTTNGLPPHLNGLLKKALKMSAPNFSKILKNLKVDLLIYDFLQPWAEKVALSQNIPAVKLLTSGAALFSYFFHFVTKPGVEFPFPAIRLSKREQDKMREMFGTEPTDDDFLAEAPNQIMLMCTSRIIEAKYIDYLTELMNWKVVPVGPPFQDPLTEDDDDKELIDWLGTKDPNSTVYVSFGSEYFLSKEDMEEIAFGLELSNVNFIWVVRFPKGEEQNLEEALPKGFLERIGERGRVLDHLVPQAHILNHKSTGGFVSHCGWNSVMESIDFGVPIIAMPMQWDQPINARLIVELGVAVEIVRDENGKIHRDEIAQVIKDVIVGKTGENLRANVADIATNLKLIRDEEMTAAALALIQLCQNRNAYK

SEQ ID NO: 609 - protein, 440 aa, synthetic construct
STLRVLMFPWLALGHVNPFLRLAKKLADRGFYIYLCNTPINLNSIKKRIPEKYSDSIQLVELHLPELPELPPHYHTTNGLPPHLNGLLKKALKMSAPTFSKILQDLKVDLLIYDFLQPWAEKLALSQNIPAVKLLTSGAALFAYFWHFVKKPGVPFPFPAIRLSKREQDKMREMFGTEPTDDDFLAEGSNQIMLMCTSRIIEAKYIDYLQKLMNWKVVPVGPPFQDPLTEDDDDKELIRWLGTKDPNSTVYVSFGSEYFLSKEQMEEIAFGLELSNLNFIWVVRFPKGEEQNLEEALPKGFLERIGERGRVLDHLVPQAHILNHKSTGGFLSHCGWNSVMESIDFGVPIIAMPMQWDQPINARLIVELGVAVEIVRDENGKIHRGEIAQVLKDVIVGKLGEILRANVADIAENLKLIRDEEMDAAAEELIRLCQNRNAYK

SEQ ID NO: 610 - protein, 440 aa, synthetic construct
STLRVLMFPWLALGHVNPFLRLAKKLADRGFYIYLCNTPINLNSIKKRIPEKYADSIQLVELHLPELPELPPHYHTTNGLPPHLNGLLKKALKMSAPTFSKILQDLKPDLLIYDFLQPWAEKVALSQNIPAVKLLTSGAALFAYFWTFVKKPGVPFPFPAIRLSKRELDKMREMFGTEPTDDDFLAEGSNQIMLMCTSRIIEAKYIDYLQKLMNWKVVPVGPPFQDPLTEDDDDKELIRWLGTKDPNSTVYVSFGSEYFLSKEQMEEIAFGLELSNVNFIWVVRFPKGEEQNLEEALPKGFLERIGERGRVLDHLVPQAHILNHKSTGGFMSHCGWNSVMESIDFGVPIIAMPMQWDQPINARLIVELGVAVEIVRDENGKIHRGEIAQVVKDVIVGKLGEKLRANVADIAENLKLIRDEEMTIAALELIKLCQNRNAYK

SEQ ID NO: 611 - protein, 440 aa, synthetic construct
STLTVLMFPWLALGHVNPFLRLAKKLADRGFYIYLCSTPINLNSIKKRIPYKYSDSIQLVELHLPELPELPPHYHTTNGLPPHLNGLLKKALKMSAPNFSKILKNLNVTLLIYDFLIPWASKVALSQNIPAVKLLTSGAALFAYFFHFVKKPGVEFPFPAIRLSKREQDKMREMFGTEPTDDDFLAEASNQIMLMCTSRIIEAKYIDYLTELMNWKVVPVGPPFQDPLTEDDDDKELIDWLGTKDPNSTVYVSFGSEYFLSKEDMEEIAFGLELSGVNFIWVVRFPKGEEQNLEEALPKGFLERIGERGRVLDHLVPQAHILNHSSTGGFVSHCGWNSVMESIDFGVPIIAMPMQWDQPINARLIVELGVAVEIVRDENGKIHRDAIAQVIKDVIVGKLGEKLRANVRDIAENLKLIRDEEMTAAAEELIQLCQNRNAYK

SEQ ID NO: 612 - protein, 440 aa, synthetic construct
STLQVLMFPWLALGHVNPFLRLAKQLADRGFYIYLCSTPINLNSIKKRIPYKYSDSIQLVELHLPELPELPPHYHTTNGLPPHLNGVLKKALKMSAPNLSKILKDLKPDLLIYDFLLPWAEKLALERNIPAVKLLTSGAALFAYFFHFVQKPGVEFPFPAIRLSKREQDKMREMFGTEPTDDDFLAEFQNQIMLMCTSRIIEAKYIDYLTKLMNWKVVPVGPPFQDPLTEDDDDKELIDWLGTKDENSTVYVSFGSEYFLSKEDMEEIAFGLELSNVNFIWVVRFPKGEEQNLEEALPKGFLERIGERGRVLDHLVPQAHILNHSSTGGFMSHCGWNSVMESIDFGVPIIAMPMQWDQPINARLIVELGVAVEIVRDENGKIHRDEIAQVLKDVIVGKLGEILRANVRDIATNLKLIRDEEMNIAAEELIKLCQNRNAYK

SEQ ID NO: 613 - protein, 440 aa, synthetic construct
STLRVLMFPWLALGHVNPFLRLAKKLADRGFYIYLCSTPINLNSIKKRIPNKYSDSIQLVELHLPELPELPPHYHTTNGLPPHLNGTLKKALKMSAPNFSKILKALKVDLLIYDFLQPWAEKVALSRNIPAVKLLTSGAALFAYFVHFVKKPGVEFPFEAIRLSKREQDKMREMFGTEPTDDDFLAEFSNQIMLMCTSRIIEAKYIDYLTKLMNWKVVPVGPPFQDPLTEDDDDKELIDWLGTKDENSTVYVSFGSEYFLSKEDMEEIAFGLELSNVNFIWVARFPKGEEQNLEEALPKGFLERIGERGRVLDHLVPQAHILNHKSTGGFVSHCGWNSVMESIDFGVPIIAMPMQWDQPINARLIVELGVAVEIVRDENGKIHRGEIAQVIKDVIVGKTGENLRAKVRDIATNLKLIRDVEMTAAAEALIQLCQNRNAYK

SEQ ID NO: 614 - protein, 440 aa, synthetic construct
STLRVLMFPWLALGHVNPFLRLAKKLADRGFYIYLCSTPINLNSIKKRIPNKYSDSIQLVELHLPELPELPPHYHTTNGLPPHLNGVLKKALKMSAPNFSKILKNLKVDLLIYDFLQPWASKVALSQNIPAVKLLTSGAALFAYFFHFVKKPGVEFPFEAIRLSKREQDKMREMFGTEPTDDDFLAEFSNQIMLMCTSRIIEAKYIDYLTELMNWKVVPVGPPFQDPLTEDDDDKELIDWLGTKDENSTVYVSFGSEYFLSKEDMEEIAFGLELSNVNFIWVARFPKGEEQNLEEALPKGFLERIGERGRVLDHLVPQAHILNHSSTGGFVSHCGWNSVMESIDFGVPIIAMPMQWDQPINARLIVELGVAVEIVRDENGKIHRDEIAQVIKDVIVGKLGEKLRANVRDIAENLKLIRDVEMTAAALELIQLCQNRNAYK

SEQ ID NO: 615 - protein, 440 aa, synthetic construct
STLRVLMFPWLALGHVNPFLRLAKDLADRGFYIYLCSTPVNLNSIKKRIPNKYSDSIQLVELHLPELPELPSHYHTTNGLPPHLNGVLKKALKMSAPEFSKILKNLKVDLLIADFLQPWASKLALSQNVPSVKLLTSGAALFAYFVHFVKKPGVEFPFPAIRLSKRELDKMREMFGTEPTDLDFLAEGSNQITLMCTSRIIEAKYIDYLQKLMNWKVVPVGPPFQVPLPEDDDDKELIDWLGTKDENSTVYVSFGSEYFLSKEDMEEIAFGLELSNVNFIWVARFPKGEEQNLIEALPPGFLERIGERGRVLDHLVPQAHILNHKSTGGFLSHCGWNSVMESIDFGVPIIAMPMQWDQPINARLIVELGVAVEIVRDENGKIHRGEIAQVIKDVIVGKLGEKLRANVRDIAENLKLIRDVEMTIAAEELIKLCQNRSAYK

SEQ ID NO: 616 - protein, 440 aa, synthetic construct
STLRVLMFPWLALGHVNPFLRLAKKLADRGFYIHLCSTPINLNSIKKRIPNKYSDSIQLVELHLPELPELPPHYHTTNGLPPHLNGTLKKALKMSAPEFSKILKNLKPDLLIYDFLQPWAEKVALSQNIPAVKLLTSGAALFAYFVHFVKKPGVEFPFPAIRLSKREQDKMREMFGTEPTDDDFLAEASNQYMLMCTSRIIEAKYIDYLTKLMNWKVVPVGPPFQDPLTEDDDDKELIDWLGTKDENSTVYVSFGSEYFLSKEDMEEIAFGLELSNVNFIWVARFPKGEEQNLEEALPKGFLERIGERGRVLDHLVPQAHILNHKSTGGFVSHCGWNSVMESIDFGVPIIAMPMQWDQPINARLIVELGVAVEIVRDENGKIHRGEIAQVIKDVIVGKTGENLRAKVRDIALNLKLIRDVEMTAAAEALIQLCQNRNAYK

SEQ ID NO: 617 - protein, 440 aa, synthetic construct
STLRVLMFPWLALGHVNPFLRLAKKLADRGFYIYLCSTPINLNSIKKRIPEKYSDSIQLVELHLPELPELPPHYHTTNGLPPHLNGTLKKALKMSAPEFSKILKNLKPDLLIYDFLQPWAEKVALSQNVPGVKLLTSGAALFAYFFEFVKKPGVEFPFPAIRLSKREQDKMREMFGTEPTDDDFLAEASNQIMLMCTSRIIEAKYIDYLTKLMNWKVVPVGPPFQDPLTEDDDDKELIRWLGTKDENSTVYVSFGSEYFLSKEDMEEIAFGLELSGVNFIWVARFPKGEEQNLEEALPKGFLERIGERGRVLDHLVPQAHILNHSSTGGFVSHCGWNSVMESIDFGVPIIAMPMQWDQPINARLIVELGVAVEIVRDENGKIHRGEIAQVIKDVIVGKTGENLRAKVRDIALNLKLIRDVEMDAAAEELLQLCQNRNAYK

SEQ ID NO: 618 - protein, 440 aa, synthetic construct
TTLRVLMFPWLALGHVNPFLRLAKKLADRGFLIYLCSTPINLNSIKKRIPEKYSDSIQLVELHLPELPELPPHYHTTNGLPPHLNGTLHKALKMSAPEFSKILQNLKPDLVIYDFLQPWASKVALSQNIPAVKLLTSGAALFSYFVHFVKKPGVEFPFPAIRLSKREQDKMREMFGTEPTDEDFLAEFQMGIMLMCTSREIEAKYIDYLTKLSNRKVVPVGPPFQDPLTDDDDDSELIDWLGKKDENSTVYVSFGSEYFLSKEDMEEIAFGLELSNVNFIWVARFPKGEEQNLEDALPKGFLERIGDRGRVLDHLVPQAHILNHPSTGGFVSHCGWNSVMESIDFGVPIIAMPMQWDQPINARLMVELGVAVEIVRDDNGKIHRDEIAEVVKDVIGGKTGEKLRKKVRDIAENLKSKRKVEMDAAVEELILLCTNRNAYK

SEQ ID NO: 619 - protein, 440 aa, synthetic construct
STLRVLMFPWLALGHVNPFLRLAKKLADRGFYIYLCNTPVNLNLIKKRIPEKYSDSIQLVELHLPELPELPPHLHTTNGLPPHLNGLLKKALKMSAPTFSKILKDLKVDLLIYDFLIPWAEKVALSQNIPAVKLLTSGAALFAYFFHHVTKPGVEFPFPAIRLSKREQDKMYEMFGTEPTDLDFLAEAPNQIMLMCTSRIIEAKYIDYLQKLMNWKVVPVGPTFQDPLTEDDSDKELIDWLGTKDPNSTVYVSFGSEYFLSKEQMEEIAFGLELSNVNFIWVVRFPKGEEQTLEEALPPGFLERIGERGRVLDHLVPQAHILNHKSTGGFVSHCGWNSVMESIDFGVPIIAMPMQWDQPINARLIVELGVAVEIVRDENGKIHRDEIAQVIKDVIVGKLGEKLRANVADIATNLKLIRDEEMTIAALALIKLCQKRRATV

SEQ ID NO: 620 - protein, 440 aa, synthetic construct
STLRVLMFPWLALGHVNPFLRLAKKLADRGFYIYLVNTAINLELIKKRIPEKYSNSIHLVELALPELPELPPHYHTTNGLPPHLNGLLKKALKMSAPTFSKILKDLKVDLLIYDFLIPWAEKVALSQNIPAVKLLTSGAALFAYFFHFVTKPGVEFPFPAIRLSKREQDKMREMFGTEPTDDDFLAEAPNQIMLMCTSRIIEAKYIDYLQKLMNWKVVPVGPPFQDPLTEDIDDPELIRWLGTKDPNSTVYVSFGSEYFLSKEQMEEIAFGLELSNVNFIWVVRFPKGEEQNLEEALPKGFLERIGERGRVLDHLVPQAHILNHKSTGGFVSHCGWNSVMESIDFGVPIIAMPMQWDQPINARLIVELGVAVEIVRDENGKIHRDEIAQVIKDVIVGKLGEKLRANVADIATNLKLIRDEEMTIAALALIKLCQNRNAYK

SEQ ID NO: 621 - protein, 440 aa, synthetic construct
STLRVLMFPWLALGHVNPFLRLAKKLADRGFYIYLCNTPINLNLIKKRIPEKYSDSIQLVELHLPELPELPPHYHTTNGLPPHLNGLLKKALKMSAPTFSKILKDLKVDLLIYDFLIPWAEKVALSQNIPAVPLLTSGAALFAYFFHFVTKPGVEFPFPAIRLSKREQDKMREMFGTEPTDDDFLAPANAQIMLMCTSRIIEAKYIDYLQKLMNVKVVPVGPPFQDPLTEDDDDKELIRWLGTKDPNSTVYVSFGSEYFLSKEQMEEIAFGLELSNVNFIWVVRFPKGEEQNLEEALPKGFLERIGERGRVLDHLVPQAHILNHKSTGGFVSHCGWNSVMESIDFGVPIIAMPMQWDQPINARLIVELGVAVEIVRDENGKIHRDEIAQVIKDVIVGKLGEKLRANVADIATNLKLIRDEEMTIAALALIKLCQNRNAYK

SEQ ID NO: 622 - protein, 440 aa, synthetic construct
STLRVLMFPWLALGHVNPFLRLAKKLADRGFYIYLCNTPINLNSIKKRIPEKYSDSIQLVELHLPELPELPPHYHTTNGLPPHLNGLLKKALKMSAPTFSKILQDLKVDLLIYDFLQPWAEKLALSQNIPAVPLLTSGAALFAYFWHFVKKPGVPFPFPAIRLSKRELDKMREMFGTEPTDDDFLAPGNAQIMLMCTSRIIEAKYIDYLQKLMNVKVVPVGPPFQDPLTEDDDDKELIRWLGTKDPNSTVYVSFGSEYFLSKEQMEEIAFGLELSNLNFIWVVRFPKGEEQNLEEALPKGFLERIGERGRVLDHLVPQAHILNHKSTGGFLSHCGWNSVMESIDFGVPIIAMPMQWDQPINARLIVELGVAVEIVRDENGKIHRGEIAQVLKDVIVGKLGEILRANVADIAENLKLIRDEEMDIAAEELIRLCQNRNAYK

SEQ ID NO: 623 - protein, 440 aa, synthetic construct
STLRVLMFPWLALGHVNPFLRLAKKLADRGFYIYLVSTAINLESIKKRIPYKYVNSIHLVELALPELPELPPHYHTTNGLPPHLNGTLKKALKMSAPTFSKILKALKVDLLIYDFLQPWAEKVALSQNVPAVKLLTSGAALFAYFVEFVKKPGVEFPFPAIRLSKREQDKMREMFGTEPTDDDFLAEASNQIMLMCTSRIIEAKYIDYLTKLMNWKVVPVGPPFQDPLTEDIDDPELIDWLGTKDENSTVYVSFGSEYFLSKEDMEEIAFGLELSNVNFIWVVRFPKGEEQNLEEALPKGFLERIGERGRVLDHLVPQAHILNHSSTGGFVSHCGWNSVMESIDFGVPIIAMPMQWDQPINARLIVELGVAVEIVRDENGKIHRGEIAQVIKDVIVGKTGENLRAKVRDIALNLKLIRDVEMDAAAEALIQLCQNRNAYK

SEQ ID NO: 624 - protein, 440 aa, synthetic construct
STLRVLMFPWLALGHVNPFLRLAKKLADRGFYIYLCSTPINLNSIKKRIPYKYVDSIQLVELHLPELPELPPHYHTTNGLPPHLNGTLKKALKMSAPTFSKILKALKVDLLIYDFLQPWAEKVALSQNVPAVPLLTSGAALFAYFVEFVKKPGVEFPFPAIRLSKREQDKMREMFGTEPTDDDFLAPANAQIMLMCTSRIIEAKYIDYLTKLMNVKVVPVGPPFQDPLTEDDDDKELIDWLGTKDENSTVYVSFGSEYFLSKEDMEEIAFGLELSNVNFIWVVRFPKGEEQNLEEALPKGFLERIGERGRVLDHLVPQAHILNHSSTGGFVSHCGWNSVMESIDFGVPIIAMPMQWDQPINARLIVELGVAVEIVRDENGKIHRGEIAQVIKDVIVGKTGENLRAKVRDIALNLKLIRDVEMDAAAEALIQLCQNRNAYK

SEQ ID NO: 625 - protein, 440 aa, synthetic construct
TLLRVLMFPWLALGHVNPFLRLAKKLADRGFLIYLVNTAINLELIKKRIPEKYSNSIHLVELALPELPELPPHYHTTNGLPPHLNGLLHKALKMSAPTFSKILQDLKVDLVIYDFLIPWASKVALSQNIPAVKLLTSGAALFAYFVHFVKKPGVEFPFPAIRLSKREQDKMREMFGTEPTDEDFLVEFQMGIMLMCTSREIEAKYIDYLTKLSNRKVVPVGPPFQDPLTDDIDDPELIDWLGKKDPNSTVYVSFGSEYFLSKEQMEEIAFGLELSNVNFIWVVRFPKGEEQNLEDALPKGFLERIGDRGRVLDHLVPQAHILNHPSTGGFVSHCGWNSVMESIDFGVPIIAMPMQWDQPINARLMVELGVAVEIVRDDNGKIHRDEIAEVVKDVIGGKLGEKLRKNVRDIALNLKSKRKEEMDIAVEELIRLCTNRNAYK

SEQ ID NO: 626 - protein, 440 aa, synthetic construct
TLLRVLMFPWLALGHVNPFLRLAKKLADRGFLIYLCNTPINLNLIKKRIPEKYSDSIQLVELHLPELPELPPHYHTTNGLPPHLNGLLHKALKMSAPTFSKILQDLKVDLVIYDFLIPWASKVALSQNIPAVPLLTSGAALFAYFVHFVKKPGVEFPFPAIRLSKREQDKMREMFGTEPTDEDFLVPFNAGIMLMCTSREIEAKYIDYLTKLSNVKVVPVGPPFQDPLTDDDDDSELIDWLGKKDPNSTVYVSFGSEYFLSKEQMEEIAFGLELSNVNFIWVVRFPKGEEQNLEDALPKGFLERIGDRGRVLDHLVPQAHILNHPSTGGFVSHCGWNSVMESIDFGVPIIAMPMQWDQPINARLMVELGVAVEIVRDDNGKIHRDEIAEVVKDVIGGKLGEKLRKNVRDIALNLKSKRKEEMDIAVEELIRLCTNRNAYK

SEQ ID NO: 627 - protein, 440 aa, synthetic construct
STLRVLMFPWLALGHVNPFLRLAKKLADRGFYIYLVSTAINLESIKKRIPEKYSNSIHLVELALPELPELPPHYHTTNGLPPHLNGTLKKALKMSAPNFSKILKNLKPDLLIYDFLQPWAEKVALSQNIPAVKLLTSGAALFSYFFHFVKKPGVEFPFPAIRLSKREQDKMREMFGTEPTDDDFLAEGSNQIMLMCTSRIIEAKYIDYLTELMNWKVVPVGPPFQDPLTEDIDDPELIDWLGTKDENSTVYVSFGSEYFLSKEDMEEIAFGLELSNVNFIWVARFPKGEEQNLEEALPKGFLERIGERGRVLDHLVPQAHILNHSSTGGFVSHCGWNSVMESIDFGVPIIAMPMQWDQPINARLIVELGVAVEIVRDENGKIHRGEIAQVIKDVIVGKTGENLRAKVRDISENLKLIRDEEMDAAAEELIQLCQNRNAYK

SEQ ID NO: 628 - protein, 440 aa, synthetic construct
STLRVLMFPWLALGHVNPFLRLAKKLADRGFYIYLCSTPINLNSIKKRIPEKYSDSIQLVELHLPELPELPPHYHTTNGLPPHLNGTLKKALKMSAPNFSKILKNLKPDLLIYDFLQPWAEKVALSQNIPAVPLLTSGAALFSYFFHFVKKPGVEFPFPAIRLSKREQDKMREMFGTEPTDDDFLAPGNAQIMLMCTSRIIEAKYIDYLTELMNVKVVPVGPPFQDPLTEDDDDKELIDWLGTKDENSTVYVSFGSEYFLSKEDMEEIAFGLELSNVNFIWVARFPKGEEQNLEEALPKGFLERIGERGRVLDHLVPQAHILNHSSTGGFVSHCGWNSVMESIDFGVPIIAMPMQWDQPINARLIVELGVAVEIVRDENGKIHRGEIAQVIKDVIVGKTGENLRAKVRDISENLKLIRDEEMDAAAEELIQLCQNRNAYK

SEQ ID NO: 629 - protein, 440 aa, synthetic construct
TTLRVLMFPWLALGHVNPFLRLAKKLADRGFLIYLVSTAINLESIKKRIPEKYSNSIHLVELALPELPELPPHYHTTNGLPPHLNGTLHKALKMSAPNFSKILQNLKPDLVIYDFLQPWAEKVALSQNIPAVKLLTSGAALFSYFFHFVKKPGVEFPFPAIRLSKREQDKMREMFGTEPTDEDFLAEGPMGIMLMCTSREIEAKYIDYLTELSNRKVVPVGPPFQDPLTDDIDDPELIDWLGKKDENSTVYVSFGSEYFLSKEDMEEIAFGLELSNVNFIWVARFPKGEEQNLEDALPKGFLERIGDRGRVLDHLVPQAHILNHPSTGGFVSHCGWNSVMESIDFGVPIIAMPMQWDQPINARLMVELGVAVEIVRDDNGKIHRGEIAEVVKDVIGGKTGENLRKKVRDISENLKSKRKEEMDAAVEELIQLCTNRNAYK

SEQ ID NO: 630 - protein, 440 aa, synthetic construct
TTLRVLMFPWLALGHVNPFLRLAKKLADRGFLIYLCSTAINLESIKKRIPEKYSDSIHLVELALPELPELPPHYHTTNGLPPHLNGTLHKALKMSAPNFSKILQNLKPDLVIYDFLQPWAEKVALSQNIPAVKLLTSGAALFSYFFHFVKKPGVEFPFPAIRLSKREQDKMREMFGTEPTDEDFLAEGPMGIMLMCTSREIEAKYIDYLTELSNRKVVPVGPPFQDPLTDDIDDPELIDWLGKKDENSTVYVSFGSEYFLSKEDMEEIAFGLELSNVNFIWVARFPKGEEQNLEDALPKGFLERIGDRGRVLDHLVPQAHILNHPSTGGFVSHCGWNSVMESIDFGVPIIAMPMQWDQPINARLMVELGVAVEIVRDDNGKIHRGEIAEVVKDVIGGKTGENLRKKVRDISENLKSKRKEEMDAAVEELIQLCTNRNAYK

SEQ ID NO: 631 - protein, 440 aa, synthetic construct
TTLRVLMFPWLALGHVNPFLRLAKKLADRGFLIYLCSTPINLNSIKKRIPEKYSDSIQLVELHLPELPELPPHYHTTNGLPPHLNGTLHKALKMSAPNFSKILQNLKPDLVIYDFLQPWAEKVALSQNIPAVKLLTSGAALFSYFFHFVKKPGVEFPFPAIRLSKREQDKMREMFGTEPTDEDFLAEGPMGIMLMCTSREIEAKYIDYLTELSNRKVVPVGPPFQDPLTDDIDDPELIDWLGKKDENSTVYVSFGSEYFLSKEDMEEIAFGLELSNVNFIWVARFPKGEEQNLEDALPKGFLERIGDRGRVLDHLVPQAHILNHPSTGGFVSHCGWNSVMESIDFGVPIIAMPMQWDQPINARLMVELGVAVEIVRDDNGKIHRGEIAEVVKDVIGGKTGENLRKKVRDISENLKSKRKEEMDAAVEELIQLCTNRNAYK

SEQ ID NO: 632 - protein, 440 aa, synthetic construct
TTLRVLMFPWLALGHVNPFLRLAKKLADRGFLIYLCSTPINLESIKKRIPEKYSDSIQLVELHLPELPELPPHYHTTNGLPPHLNGTLHKALKMSAPNFSKILQNLKPDLVIYDFLQPWAEKVALSQNIPAVKLLTSGAALFSYFFHFVKKPGVEFPFPAIRLSKREQDKMREMFGTEPTDEDFLAEGPMGIMLMCTSREIEAKYIDYLTELSNRKVVPVGPPFQDPLTDDIDDPELIDWLGKKDENSTVYVSFGSEYFLSKEDMEEIAFGLELSNVNFIWVARFPKGEEQNLEDALPKGFLERIGDRGRVLDHLVPQAHILNHPSTGGFVSHCGWNSVMESIDFGVPIIAMPMQWDQPINARLMVELGVAVEIVRDDNGKIHRGEIAEVVKDVIGGKTGENLRKKVRDISENLKSKRKEEMDAAVEELIQLCTNRNAYK

SEQ ID NO: 633 - protein, 440 aa, synthetic construct
TTLRVLMFPWLALGHVNPFLRLAKKLADRGFLIYLCSTAINLESIKKRIPEKYSDSIHLVELHLPELPELPPHYHTTNGLPPHLNGTLHKALKMSAPNFSKILQNLKPDLVIYDFLQPWAEKVALSQNIPAVKLLTSGAALFSYFFHFVKKPGVEFPFPAIRLSKREQDKMREMFGTEPTDEDFLAEGPMGIMLMCTSREIEAKYIDYLTELSNRKVVPVGPPFQDPLTDDDDDSELIDWLGKKDENSTVYVSFGSEYFLSKEDMEEIAFGLELSNVNFIWVARFPKGEEQNLEDALPKGFLERIGDRGRVLDHLVPQAHILNHPSTGGFVSHCGWNSVMESIDFGVPIIAMPMQWDQPINARLMVELGVAVEIVRDDNGKIHRGEIAEVVKDVIGGKTGENLRKKVRDISENLKSKRKEEMDAAVEELIQLCTNRNAYK

SEQ ID NO: 634 - protein, 440 aa, synthetic construct
TTLRVLMFPWLALGHVNPFLRLAKKLADRGFLIYLVSTAINLESIKKRIPEKYSNSIHLVELALPELPELPPHYHTTNGLPPHLNGTLHKALKMSAPNFSKILQNLKPDLVIYDFLQPWAEKVALSQNIPAVKLLTSGAALFSYFFHFVKKPGVEFPFPAIRLSKREQDKMREMFGTEPTDEDFLAEGPMGIMLMCTSREIEAKYIDYLTELSNRKVVPVGPPFQDPLTDDDDDSELIDWLGKKDENSTVYVSFGSEYFLSKEDMEEIAFGLELSNVNFIWVARFPKGEEQNLEDALPKGFLERIGDRGRVLDHLVPQAHILNHPSTGGFVSHCGWNSVMESIDFGVPIIAMPMQWDQPINARLMVELGVAVEIVRDDNGKIHRGEIAEVVKDVIGGKTGENLRKKVRDISENLKSKRKEEMDAAVEELIQLCTNRNAYK

SEQ ID NO: 635 - protein, 440 aa, synthetic construct
TTLRVLMFPWLALGHVNPFLRLAKKLADRGFLIYLCSTPINLNSIKKRIPEKYSDSIQLVELHLPELPELPPHYHTTNGLPPHLNGTLHKALKMSAPNFSKILQNLKPDLVIYDFLQPWAEKVALSQNIPAVPLLTSGAALFSYFFHFVKKPGVEFPFPAIRLSKREQDKMREMFGTEPTDEDFLAPGNAGIMLMCTSREIEAKYIDYLTELSNVKVVPVGPPFQDPLTDDDDDSELIDWLGKKDENSTVYVSFGSEYFLSKEDMEEIAFGLELSNVNFIWVARFPKGEEQNLEDALPKGFLERIGDRGRVLDHLVPQAHILNHPSTGGFVSHCGWNSVMESIDFGVPIIAMPMQWDQPINARLMVELGVAVEIVRDDNGKIHRGEIAEVVKDVIGGKTGENLRKKVRDISENLKSKRKEEMDAAVEELIQLCTNRNAYK

SEQ ID NO: 636 - protein, 440 aa, synthetic construct
QPIKILMFPWLALGHVNPFLRIAKQLADRGFIIYLVSTKINLELAEKRIPERYKDRIHLVEFKLPELPELPEHLHTTNGLPPHLNGTLHKALKEAAPELSKIIEELQPDLVLYDFLIPWAEEVAASHDIPGVPLLTSGAALFSYFFNFLKRPGHEFPFPGIRLSKREQDKMREMFGTEPTELDFLVPANAGVMLMCTSPEIEAPYLAYCEELTGVEVVPVGAPFQDPLTEDIYDPELIAWLDTKPDGSVVYVSFGSEYFLSPEQMEEVALGLLESGAYFIWVARFPKGEEQPLEEVLPEGFLERIGDRGRVLDHLVPQAHILNHPATGGFISHCGWNSVMESIDFGVPIIAMPMQWDQPINARLLVELGVAVEIPRDEDGRIHREVIAETIRRVIYGEEGKKLREKVKEISERLRANRQALFDAAAERLREICRNRRALK

SEQ ID NO: 637 - protein, 440 aa, synthetic construct
QPIKILMFPWLALGHVNPFLRIAKQLADRGFIIYLVSTKINLELAEKRIPERYKDRIHLVEFKLPELPELPEHLHTTNGLPPHLNGTLHKALKEAAPNLAKIIEELQPDLVLYDFLIPWAADVAASHGVPAVPLLTSGAALFSYFFNFLKRPGHEFPFPEIRLSKREQDKMREMFGTEPTELDFLVPANAGLMLMCTSPEIEAPYLAYCEELTGVEVVPVGAPFQDPLTEDIYDPELIAWLDTKPEGSVVYVSFGSEYFLSPEQMRAVAEGLLLSGAYFIWVARFPKGEEQPLETVLPPGFLERIGDRGRVLDHLVPQAHILNHPATGGFISHCGWNSVMESIDFGVPIIAMPMQWDQPINARLLVAKGVAVEIPRDEDGRLHPEVIAETIRRVIYGEEGKKLRARVKELSEKLRANREALFDRAAERLAEICRNRRALK

SEQ ID NO: 638 - protein, 440 aa, synthetic construct
QPIKILMFPWLALGHVNPFLRIAKQLADRGFEIYLVSTKINLELAEKRIPERYKDRIHLVEFELPELPELPEHLHTTNGLPPHLNGTLHKALKEAAPNLEKIIKELQPDLVLYDFLIPWAEEVAAKLDVPGVPLLTSGAALFSYFFNFLKRPGHEFPFPGIRLSKREQDKMREMFGTEPTELDFLVPANAGVMLMCTSEVIEAPYLKYCEELTGVEVVPVGAPFQDPLTEDIYDPELIAWLDTKPDGSVVYVSFGSEYFLSPEQMREVALGLERSGVYFIWVARFPKGEEQPLEDVLPPGFLERIGDRGRVLDHLVPQAHILNHKATGGFISHCGWNSVMESIDFGVPIIAMPMQWDQPINARLLVELGVAVEIERDEDGRIHAETIAETLRRVIYGEEGKELRKKVKEISEELRANRDAVFDRAAARLAEICRNRRALK

SEQ ID NO: 639 - protein, 440 aa, synthetic construct
QPIKILMFPWLALGHVNPFLRIAKQLADRGFIIYLVSTKINLELAEKRIPEEYKDRIHLVEFKLPELPELPRHLHTTNGLPPHLNGTLHKALKEAAPELAKIIEELQPDLVLYDFLIPWAEEVAASHGVPGVPLLTSGAALFSYFFNFLKRPGHEFPFPGIRLSKREQDKMREMFGTEPTELDFLVPANAGVMLMCTSEEIEGEYLKYCEELTGVEVVPVGAPFQDPLTEDIYDPELIAWLDTKPEGSVVYVSFGSEYFLSPEQMRAVALGLLKSGVYFIWVARFPKGEERPLEEVLPPGFLEAIGDKGRVLDHLVPQAHILNHPATGGFISHCGWNSVMESIDFGVPIIAMPMQWDQPINARLLVEKGVAVEIPRDEDGRIHPEAIAETLKEVIYGEKGKELRKKVKELSEKLRANREAVFDRAAERLREICRNRRALK

SEQ ID NO: 640 - protein, 440 aa, synthetic construct
QPIKILMFPWLALGHVNPFLRIAKQLADRGFIIYLVSTRINLELAEKRIPEEYRDRIHLVEFELPELPELPEHLHTTNGLPPHLNGTLHKALKEAAPVLRRIIEELQPDLVLYDFLIPWAEEVAASLGVPGVPLLTSGAALFSYFFNFLKRPGHEFPFPGIRLSKREQDKMREMFGTEPTELDFLVPANAGVMLMCTSEVIEAPYLKYCEELTGVEVVPVGAPFQDPLTEDIYDPELIAWLDTKPDGSVVYVSFGSEYFLSPEQMRAVAEGLLKSGVYFIWVARFPKGEEQPLETVLPEGFLEAIGDRGRVLDHLVPQAHILNHKATGGFISHCGWNSVMESIDFGVPIIAMPMQWDQPINARLLVELGVAVEIERDEDGRIHPEVIAETLKEVIYGEKGKELRKKVKEISEKLRAERDEVFDRAAERLAELCRNRRALK

SEQ ID NO: 641 - protein, 440 aa, synthetic construct
QPIKILMFPWLALGHVNPFLRIAKQLADRGFEIYLVSTKINLELAEKRIPERYKDRIHLVEFKLPELPELPEHLHTTNGLPPHLNGTLHKALKEAAPELERIIRELQPDLVLYDFLIPWAEEVAAKLDVPAVPLLTSGAALFSYFFNFLKRPGHEFPFPGIRLSKREQDKMREMFGTEPTELDFLVPANAGLMLMCTSPEIEAPYLAYCEELTGVRVVPVGAPFQDPLTEDIYDPELIAWLDTKPEGSVVYVSFGSEYFLSPEQMREVALGLEKSGAYFIWVARFPKGEEQPLEEVLPEGFLERIGDRGRVLDHLVPQAHILNHPATGGFISHCGWNSVMESIDFGVPIIAMPMQWDQPINARLLVELGVAVEIERDEDGRIHPEVIARTIREVIYGELGKELRKKVKELSEKLRATRQALFDEAAAALREVCRNRRALK

SEQ ID NO: 642 - protein, 440 aa, synthetic construct
QPIKILMFPWLALGHVNPFLRIAKQLADRGFEIYLVSTKINLELAEKRIPEEYKDRIHLVEFKLPELPELPEHLHTTNGLPPHLNGTLHKALKEAAPNLEAIIKELQPDLVLYDFLIPWAEEVAAKHGVPGVPLLTSGAALFSYFFNFLKRPGHEFPFPGIRLSKREQDKMREMFGTEPTELDFLVPANAGVMLMCTSEVIEAPYLKYCEELTGVEVVPVGAPFQDPLTEDIYDPELIAWLDTKPEGSVVYVSFGSEYFLSPEQMKEVAEGLLKSGVYFIWVARFPKGEEQPLETVLPEGFLEAIGDRGRVLDHLVPQAHILNHKATGGFISHCGWNSVMESIDFGVPIIAMPMQWDQPINARLLVELGVAVEIERDEDGRIHADVIAETLKRVIYGEEGKRLRKKVKEISKKLREEREAVFDRAAERLREICRNRRALK

SEQ ID NO: 643 - protein, 440 aa, synthetic construct
QPIKILMFPWLALGHVNPFLRIAKQLAKRGFIIYLVSTKINLELAEKRIPEEYKDRIHLVEFKLPELPELPEHLHTTNGLPPHLNGTLHKALKEAKPVLAEIIKELQPDLVLYDFLIPWAEEVAASHGVPAVPLLTSGAALFSYFFNFLKRPGHEFPFPGIRLSKREQDKMREMFGTEPTELDFLVPANAGVMLMCTSPEIEGPYLAYCEELTGVKVVPVGAPFQDPLTEDIYDPELIAWLDTKPEGSVVYVSFGSEYFLSPEQMRAVAEGLLLSGQYFIWVARFPKGEEQPLEEVLPPGFLERIGDRGRVLDHLVPQAHILNHPATGGFISHCGWNSVMESIDFGVPIIAMPMQWDQPINARLLVEKGVAVEIPRDEDGRIHPEVIAETLREVINGELGKKLRENVKKLSERLRENREALFDEAAEELRKICRNRRALK

SEQ ID NO: 644 - protein, 440 aa, synthetic construct
QPIKILMFPWLALGHVNPFLRIAKQLADRGFEIYLVSTKINLELAEKRIPEEYKDRIHLVEFKLPELPELPEHLHTTNGLPPHLNGTLHKALKEAAPELAKIIEELQPDLVLYDFLIPWAEEVAAAHDIPGVPLLTSGAALFSYFFNFLKRPGHEFPFPGIRLSKREQDKMREMFGTEPTELDFLVPANAGVMLMCTSPVIEGPYLKYCEELTGVEVVPVGAPFQDPLTEDIYDPELIAWLDTKPEGSVVYVSFGSEYFLSPEQMRAVAEGLELSGVYFIWVARFPKGEEQPLETVLPEGFLERIGDRGRVLDHLVPQAHILNHPATGGFISHCGWNSVMESIDFGVPIIAMPMQWDQPINARLLVELGVAVEIPRDEDGRIHPEVIAETLRRVIYGEEGEKLRKNVKEISAKLRAEREALFDRAAERLAEICRNRRALK

SEQ ID NO: 645 - protein, 440 aa, synthetic construct
QPIKILMFPWLALGHVNPFLRIAKQLADRGFIIYLVSTKINLELAEKRIPEKYKDRIHLVEFKLPELPELPEHLHTTNGLPPHLNGTLHKALKEAAPNLEEILKKLQPDLVLYDFLIPWAEEVAASLGIPGVPLLTSGAALFSYFFNFLKRPGHEFPFPGIRLSKREQDKMREMFGTEPTELDFLVPANAGVMLMCTSEEIEAPYLKYCEELTGVEVVPVGAPFQDPLTEDIYDPELIAWLDTKPDGSVVYVSFGSEYFLSPEQMREVALGLLKSGQYFIWVARFPKGEEQPLEEVLPEGFLEKIGDKGRVLDHLVPQAHILNHKATGGFISHCGWNSVMESIDFGVPIIAMPMQWDQPINARLLVELGVAVEIERDEDGRIHADVIAKTIREVIDGELGKELRKKVKEISEKLRANREAVFDRAAARLEEICRNRRALK

SEQ ID NO: 646 - protein, 440 aa, synthetic construct
QPIKILMFPWLALGHVNPFLRIAKQLADRGFIIYLVSTKINLELAEKRIPEKYKDKIHLVEFKLPELPELPEHLHTTNGLPPHLNGTLHKALKEAAPNLRKIIEELQPDLVLYDFLIPWAEEVAASLGVPGVPLLTSGAALFSYFFNFLKRPGHEFPFPGIRLSKREQDKMREMFGTEPTELDFLVPANAGVMLMCTSPEIEAPYLAYCEELTGVKVVPVGAPFQDPLTEDIYDPELIAWLDTKPEGSVVYVSFGSEYFLSPEQMRAVAEGLLRSGVYFIWVARFPKGEEQPLEEVLPEGFLERIGDRGRVLDHLVPQAHILNHPATGGFISHCGWNSVMESIDFGVPIIAMPMQWDQPINARLLVELGVAVEIPRDEDGRIHPEAIAATLREVIYGEKGKELRKKVKEISEKLRANREALFDEAAETLAELCRNRRALK

SEQ ID NO: 647 - protein, 440 aa, synthetic construct
QPIRIAMFPWLALGHVNPFLRIAKQLADRGFEVYLVSTKINLELAEKRIPERYRDRIHLVEFELPELPELPPHLHTTNGLPPHLNGTLHKALKEAAPQLAAILAELQPDLVLYDFLIPWAEEVAAAHGIPGVPLLTSGAALFSYFFNFLKRPGHEFPFPGIRLSKREQDKMREMFGTEPTELDFLVPANAGVMLMCTSEVIEGPYLAYCEELTGVRVVPVGAPFQDPLTEDIYDPELIAWLDTKPEGSVVYVSFGSEYFLSPEQMRAVAEGLLKSGAYFIWVARFPKGEERPLEEVLPPGFLEAIGDRGRVLDHLVPQAHILNHPATGGFISHCGWNSVMESIDFGVPIIAMPMQWDQPINARLLVELGVAVEIPRDEDGRIHPEAIAETIKEVIYGELGKKLREKVKELSERLRAERQAVFDRAAATLREICRNRRALK

SEQ ID NO: 648 - protein, 440 aa, synthetic construct
QPIKILMFPWLALGHVNPFLRIAKQLADRGFQIYLVSTKINLELAEKRIPERYKDRIHLVEFELPELPELPEHLHTTNGLPPHLNGTLHKALKEAAPNLAKIIEELQPDLVLYDFLIPWAEEVAAAHDVPGVPLLTSGAALFSYFFNFLKRPGHEFPFPGIRLSKREQDKMREMFGTEPTELDFLVPANAGVMLMCTSEVIEAPYLKYCEELTGVEVVPVGAPFQDPLTEDIYDPELIAWLDTKPEGSVVYVSFGSEYFLSPEQMRAVALGLEKSGQYFIWVARFPKGEEQPLEEVLPEGFLERIGDRGRVLDHLVPQAHILNHKATGGFISHCGWNSVMESIDFGVPIIAMPMQWDQPINARLLVELGVAVEIERDEDGRIHPEVIAKTIREVINGEKGKELRKKVKEISEELRAKREEVFDRAAERLREICRNRRALK

SEQ ID NO: 649 - protein, 440 aa, synthetic construct
QPIKILMFPWLALGHVNPFLRIAKQLADRGFIIYLVSTKINLELAEKRIPEKYKDRIHLVEFKLPELPELPEHLHTTNGLPPHLNGTLHKALKEAAPELRKILEELQPDLVLYDFLIPWAEEVAASLGIPGVPLLTSGAALFSYFFNFLKRPGHEFPFPGIRLSKREQDKMREMFGTEPTELDFLVPANAGVMLMCTSPVIEAPYLKYCEELTGVKVVPVGAPFQDPLTEDIYDPELIAWLDTKPEGSVVYVSFGSEYFLSPEQMRAVALGLEKSGAYFIWVARFPKGEEQPLEDVLPEGFLERIGDRGRVLDHLVPQAHILNHPATGGFISHCGWNSVMESIDFGVPIIAMPMQWDQPINARLLVELGVAVEIERDEDGRIHPEVIAETIKRVIYGEEGKELRKKVKEISEQLRAQREALFDEAAATLEEICRNRRALK

SEQ ID NO: 650 - protein, 440 aa, synthetic construct
QPIKILMFPWLALGHVNPFLRIAKQLADRGFEIYLVSTKINLELAEKRIPEKYKDRIHLVEFKLPELPELPEHLHTTNGLPPHLNGTLHKALKEAAPELRKIIEELQPDLVLYDFLIPWAEEVAASLGVPGVPLLTSGAALFSYFFNFLKRPGHEFPFPGIRLSKREQDKMREMFGTEPTELDFLVPANAGVMLMCTSPVIEAPYLAYCEELTGVEVVPVGAPFQDPLTEDIYDPELIAWLDTKPEGSVVYVSFGSEYFLSPEQMREVAEGLLESGVYFIWVARFPKGEEQPLESVLPPGFLERIGDRGRVLDHLVPQAHILNHPATGGFISHCGWNSVMESIDFGVPIIAMPMQWDQPINARLLVELGVAVEIERDEDGRIHADVIAETLKEVIYGEKGKELREKVKEISAQLRAERDAVFDAAAERLAEICRNRRALK

SEQ ID NO: 651 - protein, 440 aa, synthetic construct
QPIRILMFPWLALGHVNPFLRIAKQLADRGFEIYLVSTKINLELAEKRIPEEYKDRIHLVEFRLPELPELPEHLHTTNGLPPHLNGTLHKALKEAAPELARIIEELQPDLVLYDFLIPWAEEVAAAHGVPGVPLLTSGAALFSYFFNFLKRPGHEFPFPGIRLSKREQDKMREMFGTEPTELDFLVPANAGVMLMCTSEVIEAPYLKYCEELTGVEVVPVGAPFQDPLTEDIYDPELIAWLDTKPEGSVVYVSFGSEYFLSPEQMREVAEGLLLSGAYFIWVARFPKGEEQPLETVLPPGFLERIGDRGRVLDHLVPQAHILNHPATGGFISHCGWNSVMESIDFGVPIIAMPMQWDQPINARLLVELGVAVEIPRDEDGRIHPEVIARTIKEVIYGEKGKELRKNVKEISERLRKEREAVFDKAAERLREICRNRRALK

SEQ ID NO: 652 - protein, 440 aa, synthetic construct
QPIKILMFPWLALGHVNPFLRIAKQLADRGFEIYLVSTKINLELAEKRIPEEYKDRIHLVEFKLPELPELPEHLHTTNGLPPHLNGTLHKALKEAAPELRKIIEELQPDLVLYDFLIPWAEEVAASLGVPGVPLLTSGAALFSYFFNFLKRPGHEFPFPGIRLSKREQDKMREMFGTEPTELDFLVPANAGVMLMCTSPVIEGPYLKYCEELTGVKVVPVGAPFQDPLTEDIYDPELIAWLDTKPEGSVVYVSFGSEYFLSPEQMEAVAEGLLLSGQYFIWVARFPKGEEQPLEDVLPPGFLERIGDRGRVLDHLVPQAHILNHPATGGFISHCGWNSVMESIDFGVPIIAMPMQWDQPINARLLVELGVAVEIERDEDGRIHPEVIAKTIKEVIDGELGKKLRERVKEISERLRAEREAVFDEAAETLREICRNRRALK

SEQ ID NO: 653 - protein, 440 aa, synthetic construct
QPLKVAMFPWLGLGHVNPFLRIAKDLAKRGFIIYLVSTKINLEMIKKRIPEEYKDKIHLVELKLPELPELPPHYHTTNGLPPHLNKTLHKALKMAAPEFEKILKEIKPDLVLYDFLVPWAAKVAAKLDIPAVPLLTSGAALFSYFFNFLKRPGEEFPFEHIRLSKREQDKMREMFGTEPPEEDFLAPAPSGVMLMCTSRVIEAEYIAYCEELTGNRVIPVGPPFQDPLTEDIDDPELMAWLDTKPEGSVVYVSFGSEAFLSDEDLRALAEGLLASGAYFIWVARFPKGEERPLEDVLPPGFLERIGDRGRVLDHLVPQAHILNHPSTGAFISHCGWNSVMESIDFGVPIIAMPMQWDQPINARLLERLGVAVIIPRDEDGRYHAADIARVIKEVIFGELGKELRAKVAEISARLRAEREAELDEAAAALRALCRNRNAYK

SEQ ID NO: 654 - protein, 440 aa, synthetic construct
QRPKILMFPWLALGHVNPFLRIAKQLADRDFEVYLVSTPINLELAKKRIPEEYKDRIKLIEYKLPELPELPPHLHTTNGLPPHLNGTLHKALKMAAPRFDEIVKELQPDLVLYDFLIPWAEKIAAAHGVPGVPLLTSGAALFSYFFNFLKRPGHEFPFPAIRLSKREQDKMREMFGTEPTELDFLVPANAGLMLMCTSRVIEGPYLDYCQQLTNVRVVPVGAPFQDPLTEDIYDPELIAWLDTKPEGSVVYVSFGSEYFLSREQMEEVARGLLESGAYFIWVARFPKGEEQPLEEVLPEGFLEAAGDRGRVLDHLVPQAHILNHPATGGFISHCGWNSVMESIDFGVPIIAMPMQWDQPINARLLVDLGVAVEIRRDEDGRIRAEDIARTIREMIYGELGKKLRENVKRIAEELRAARQAEMDEAAAALRELCLRRRALK

SEQ ID NO: 655 - protein, 440 aa, synthetic construct
QRPKVLMFPWLALGHVNPFLRIAKELADRGFEVYLVSTAINLELAAKRIPEEYKDRIHLVEFELPELPELPPHLHTTNGLPPHLNGTLHKALKEARPRLDEIVKELQPDLVLYDFLIPWAAEVALAHGVPAVPLLTSGAALFSYFFNFLKRPGHEFPFPEIRLSKREQDKMREMFGTEPTELDFLVPANAGLMLMCTSRVIEGEYLAYCEELTNVRVVPVGAPFQDPLTEDIYDPELIAWLDTKPENSVVYVSFGSEYFLSQEQIEEIARGLLESGAYFIWVARFPKGEEQNLEDVLPEGFLEAIGDRGRVLDHLVPQAHILNHPATGGFISHCGWNSVMESIDFGVPIIAMPMQWDQPINARLLVSLGVAVEIERDEDGRIHAEDIARTIREMIYGELGKKLREQTKRIAAELRAARQAELDEAAAALRELCLARRALK

SEQ ID NO: 656 - protein, 440 aa, synthetic construct
QRPKVLMFPWLALGHVNPFLRIAKELADRGFEIYLVNTAPNLELAKKRIPEKYKDRIHLVEYPLPELPELPPHLHTTNGLPPHLNGTLHKALKAAAPRLDEQVKELQPDLVLYDFLIPWAEEIAAAHGVPGVPLLTSGAALFSYFFNFLKRPGHEFPFPEIRLSKREQDKMREMFGTEPTELDFLVPANAGLMLMCTSRVIEGKYIDYCEKLTNVKVIPVGAPFQDPLTEDIYDPELIAWLDTKPENSVVYVSFGSEYFLSPEQIEEVARGLLESGVYFIWVARFPKGEEQNLEDVLPEGFLEAIGDRGRVLDHLVPQAHILNHPSTGAFISHCGWNSVMESIDFGVPIIAMPMQWDQPINARLLESLGVAKIIERDEDGRIHADDIARVLKEMIYGELGKKLRENVKRISKELRARRQEEIDEAAAALRELCLARRALK

SEQ ID NO: 657 - protein, 440 aa, synthetic construct
QRPKILMFPWLALGHVNPFLRIAKELADRGFEIYLVSSKVNLELAKKRIPEEYKDRIHLVEYELPELPELPPELHTTNGLPPHLNGTLHKALKAAAPRLDEIVKELQPDLVLYDFLIPWAEEIAAAHGVPGVPLLTSGAALFSYFFNFLKRPGHEFPFPEIRLSKREQDKMREMFGTEPTELDFLVPANAGLMLMCTSRVIEGKYIDYCEELTNVKVIPVGAPFQDPLTEDIYDPELIAWLDTKPENSVVYVSFGSEYFLSREQIEEVARGLLESGVYFIWVARFPKGEEQNLEDVLPEGFLEALGDRGRVLDHLVPQAHILNHPATGAFISHCGWNSVMESIDFGVPIIAMPMQWDQPINARLLKSLGVAVEIERDEDGRLHADDIARVLREMIYGELGKKLREQTRRIAEQLRAEREAEIDEAAAALRELCLARRALK

SEQ ID NO: 658 - protein, 440 aa, synthetic construct
QRPKILMFPWLALGHVNPFLRIAKQLADRDFEVYLVSTAINLELAKKRIPEEYKDRIHLVEFELPELPELPPHLHTTNGLPPHLNGTLHKALKASAPRLDEQVKELQPDLVLYDFLIPWAEKIAAAHGVPGVPLLTSGAALFSYFFNFLKRPGHEFPFPEIRLSKREQDKMREMFGTEPTELDFLVPANAGLMLMCTSRAIEAPYLEYCSQLTNVRVVPVGAPFQDPLTEDIYDPELIAWLDTKPEGSVVYVSFGSEYFLSPEQIAEVARGLLESGAYFIWVARFPKGEEQPLEDVLPEGFLEAIGDRGRVLDHLVPQAHILNHPATGGFISHCGWNSVMESIDFGVPIIAMPMQWDQPINARLLVSKGVAVEIERDEDGRIHADDIARTIKEVIYGELGKKLRENVKRLSAELRARRQAELDEAAAALRELCLRRRALK

SEQ ID NO: 659 - protein, 440 aa, synthetic construct
QRPKVLMFPWLALGHVNPFLRIAKDLADRGFEIYLVNSAVNLELAKKRIPEKYKDRIHLVEYPLPELPELPPELHTTNGLPPHLNGTLHKALKEAAPRLDEIIKELQPDLVLYDFLIPWAAELAAAHGVPAVPLLTSGAALFSYFFNFLKRPGHEFPFPEIRLSKREQDKMREMFGTEPTELDFLVPANAGIMLMCTSRVIEAEYIDYCSELTNVKVIPVGAPFQDPLTEDIYDPELLAWLDTKPENSVVYVSFGSEYFLSPEQIEEVARGLLESGVNFIWVARFPKGEEQNLEDVLPEGFLEAIGDRGRVLDHLVPQAHILNHPSTGGFISHCGWNSVMESIDFGVPIIAMPMQWDQPINARLLESLGVAKIIRRDEDGRIHADDIARVLKEVIYGELGKKLREQVRRIAAELRAAREAELDEAAAALRELCLARRALK

SEQ ID NO: 660 - protein, 440 aa, synthetic construct
QRPKVLMFPWLALGHVNPFLRIAKQLADRGFEIYLVSTKINLELAKKRIPEEYKDRIHLVEYELPELPELPPHLHTTNGLPPHLNGTLHKALKAAAPRLDEIVKELQPDLVLYDFLIPWAEKIAAAHGVPGVPLLTSGAALFSYFFNFLKRPGHEFPFPAIRLSKREQDKMREMFGTEPTELDFLVPANAGLMLMCTSRVIEAEYLDYCQELTNVKVVPVGAPFQDPLTEDIYDPELIAWLDTKPENSVVYVSFGSEYFLSREQIEEVARGLLESGVYFIWVARFPKGEEQNLEDVLPEGFLEAAGDRGRVLDHLVPQAHILNHPSTGGFISHCGWNSVMESIDFGVPIIAMPMQWDQPINARLLVSLGVAVEIRRDEDGRIHADDIARVLREVIYGELGKKLRENVRRIAAQLRAERQAEMDEAAAALRELCLARRALK

SEQ ID NO: 661 - protein, 440 aa, synthetic construct
QRPKVLMFPWLALGHVNPFLRIAKELADRGFEIYLVSTPINLELAKKRIPEKYKDRIHLVEYELPELPELPRHLHTTNGLPPHLNGTLHKALKEAAPRLDEQVKELQPDLVLYDFLIPWAAEIAAAHGVPAVPLLTSGAALFSYFFNFLKRPGHEFPFPGIRLSKREQDKMREMFGTEPTELDFLVPANAGIMLMCTSRVIEAKYLDYCSKLTNVKVVPVGAPFQDPLTEDIYDPELIAWLDTKPENSVVYVSFGSEYFLSREQIEEVARGLLESGVNFIWVARFPKGEEQNLEDVLPEGFLEAAGDRGRVLDHLVPQAHILNHPATGGFISHCGWNSVMESIDFGVPIIAMPMQWDQPINARLLVELGVAVEIRRDEDGRIHAEDIARVLKEVIYGELGKKLREQTRRIAAELRARRQAEMDEAAAALRELCLARRALK

SEQ ID NO: 662 - protein, 440 aa, synthetic construct
QRPKVLMFPWLALGHVNPFLRIAKQLADRGFEIYLVSTAINLELAKKRIPEKYKDRIHLVEYPLPELPELPPHLHTTNGLPPHLNGTLHKALKASAPRLDEIVKELQPDLVLYDFLIPWAAKVAEAHGVPAVPLLTSGAALFSYFFNFLKRPGHEFPFPEIRLSKREQDKMREMFGTEPTELDFLVPANAGLMLMCTSRVIEAEYLDYCQELTNVRVVPVGAPFQDPLTEDIYDPELIRWLDTKPENSVVYVSFGSEYFLSPEQIEEVARGLLESGVNFIWVARFPKGEEQNLEDVLPEGFLEAIGDRGRVLDHLVPQAHILNHKSTGGFISHCGWNSVMESIDFGVPIIAMPMQWDQPINARLLKSLGVAVEIERDEDGRIHADDIARVLKEVIYGELGKKLREETKRIAERLRAEREAEFDEAAAALRELCLARRALK

SEQ ID NO: 663 - protein, 440 aa, synthetic construct
QRPRILMFPWLALGHVNPFLRIAKELADRGFEIYLVNSAPNLELAKKRIPEEYKDRIHLVEYPLPELPELPPELHTTNGLPPHLNGTLHKALKAAAPRLDEIIAELQPDLVLYDFLIPWVAELAAKHGVPAVPLLTSGAALFSYFFNFLKRPGHEFPFPEIRLSKREQDKMREMFGTEPTELDFLVPANAGIMLMCTSRVIEGKYIEYCSELTNVKVIPVGAPFQDPLTEDIYDPELLAWLDTKPENSVVYVSFGSEYFLSPEQIREVAEGLLESGVYFIWVARFPKGEEQNLEDVLPEGFLEAIGDRGRVLDHLVPQAHILNHKSTGAFISHCGWNSVMESIDFGVPIIAMPMQWDQPINARLLESLGIAKIIERDEDGRIHADTIARVLKEMIYGELGKELRKKVKEISEKLRAARQAEIDEAAAALRELCAKRRALK

SEQ ID NO: 664 - protein, 440 aa, synthetic construct
QTPKILMFPWLALGHVNPFLRIAKELADRGFEIYLVSTKPNLELAKKRIPEEYKDRIHLVEFELPEYPELPPHLHTTNGLPPHLNGTLHKALKDAAPKLDEQVKELQPDLVLYDFLIPWAEKIAAKHGVPGVPLLTSGAALFSYFFNFLKRPGHEFPFPGIRLSKREQDKMREMFGTEPTELDFLVPANAGVMLMCTSDVIEAPYIAYCSKLTNVEVVPVGAPFQDPLTEDIYDPELIAWLDTKPENSVVYVSFGSEYFLSPEQMEELARGLLESGVYFIWVARFPKGEEQPLEDVLPEGFLEAIGDRGRVLDHLVPQAHILNHPATGAFISHCGWNSVMESIDFGVPIIAMPMQWDQPINARLLVEKGVAKLIERDEDGRYHAEDIAKTLKEMIYGELGKKLRENTKKIAKELRARRQAELDRAAARLRELCAKRRALK

SEQ ID NO: 665 - protein, 440 aa, synthetic construct
QTPKILMFPWLALGHVNPFLRIAKQLADRGFEVYLVSTAINLELAKKRIPEKYKDRIHLVEYALPELPELPPHLHTTNGLPPHLNGTLHKALKDSAPRLDEQVKELQPDLVLYDFLIPWAEKIAAAHGVPGVPLLTSGAALFSYFFNFLKRPGHEFPFPEIRLSKREQDKMREMFGTEPTELDFLVPANAGLMLMCTSRVIEGKYLDYCEKLTNVKVVPVGAPFQDPLTEDIYDPELIAWLDTKPENSVVYVSFGSEYFLSPEQIEEVARGLLESGAYFIWVARFPKGEEQPLEDVLPEGFLEAAGDRGRVLDHLVPQAHILNHPSTGGFISHCGWNSVMESIDFGVPIIAMPMQWDQPINARLLVSLGVAVEIRRDEDGRIHADDIARVIKEVIYGELGKKLRENVRRIAEELRARREEEMDEAAAALRELCLQRRALK

SEQ ID NO: 666 - protein, 440 aa, synthetic construct
QKPKILMFPWLALGHVNPFLRIAKQLADRGFEIYLVSTPINLELAKKRIPEKYKDRIHLVEFELPELPELPPHLHTTNGLPPHLNGTLHKALKAAAPKLDEIVKELQPDLVLYDFLIPWAEKIAAAHGVPGVPLLTSGAALFSYFFNFLKRPGHEFPFPGIRLSKREQDKMREMFGTEPTELDFLVPANAGVMLMCTSEVIEGPYLAYCSKLTNVEVVPVGAPFQDPLTEDIYDPELIAWLDTKPENSVVYVSFGSEYFLSREQIEEVARGLLESGAYFIWVARFPKGEEQPLEDVLPEGFLEAIGDRGRVLDHLVPQAHILNHPATGGFISHCGWNSVMESIDFGVPIIAMPMQWDQPINARLLVEKGVAVEIRRDEDGRIHADDIARTIKEMIYGELGKKLREKVKEISKKLRARRQEEIDRAAARLRELCEERRALK

SEQ ID NO: 667 - protein, 440 aa, synthetic construct
QKPKILMFPWLALGHVNPFLRIAKQLADRDFEIYLVSTKINLELAKKRIPEEYKDRIHLIEYELPELPELPPHLHTTNGLPPHLNGTLHKALKMAAPRFDEIVKELQPDLVLYDFLIPWAEKIAAAHGVPGVPLLTSGAALFSYFFNFLKRPGHEFPFPAIRLSKREQDKMREMFGTEPTELDFLVPANAGIMLMCTSRVIEAKYLDYCQKLTNVEVVPVGAPFQDPLTEDIYDPELIAWLDTKPENSVVYVSFGSEYFLSREQMEEVARGLLESGVYFIWVARFPKGEEQPLEDVLPEGFLEAIGDRGRVLDHLVPQAHILNHPATGGFISHCGWNSVMESIDFGVPIIAMPMQWDQPINARLLVELGVAVEIRRDEDGRIHAEDIARVLKEVIYGELGKKLRENVKEIAEKLRAEREAEMDEAAARLRELCEQRRALK

SEQ ID NO: 668 - protein, 440 aa, synthetic construct
QTPKILMFPWLALGHVNPFLRIAKDLADRGFEIYLVSTKPNLELAKKRIPEEYKDRIHLIEYELPEYPELPPHLHTTNGLPPHLNGTLHKALKDAAPKLDEIVKELQPDLVLYDFLIPWAEKIAAKHGVPGVPLLTSGAALFSYFFNFLKRPGHEFPFPGIRLSKREQDKMREMFGTEPTELDFLVPANAGVMLMCTSREIEAPYLDYCEKLTNVEVIPVGAPFQDPLTEDIYDPELIAWLDTKPENSVVYVSFGSEYFLSREQIEEVARGLLESGAYFIWVARFPKGEEQPLEDVLPEGFLEAIGDRGRVLDHLVPQAHILNHPATGAFISHCGWNSVMESIDFGVPIIAMPMQWDQPINARLLKELGVAVEIERDEDGNIHADDIARTIKEMIYGELGKKLRENTRRLAERLRAAREAELDEAAARLRALCEQRRALK

SEQ ID NO: 669 - protein, 440 aa, synthetic construct
QKPKILMFPWLALGHVNPFLRIAKQLADRGFEIYLVSTKINLELAKKRIPEEYKDSIHLVEFELPELPELPPHLHTTNGLPPHLNGTLHKALKAAQPRLDEIVRELQPDLVLYDFLIPWAEAVAAKHGVPGVPLLTSGAALFSYFFNFLKRPGHEFPFPEIRLSKREQDKMREMFGTEPTELDFLVPANAGLMLMCTSRAIEGPYLDYCEKLTNVKVVPVGAPFQDPLTEDIYDPELIAWLDTKPPDSVVYVSFGSEYFLSPEQIREVARGLLESGAYFIWVARFPKGEEQPLEDVLPEGFLEAIGDRGRVLDHLVPQAHILNHPATGGFISHCGWNSVMESIDFGVPIIAMPMQWDQPINARLLVSLGVAVEIERDEDGRIHAEDIAKTIKEMIYGELGKKLRENVRALAARLRAERDAEVDEAAAALRELCAERRALK

SEQ ID NO: 670 - protein, 440 aa, synthetic construct
QTPKVLMFPWLALGHVNPFLRIAKQLADRGFEIYLVSTPINLELAKKRIPEKYKDRIHLVEYKLPELPELPPHLHTTNGLPPHLNGTLHKALKAAAPRLDEIVKELQPDLVLYDFLIPWAEKIAAAHGVPGVPLLTSGAALFSYFFNFLKRPGHEFPFPEIRLSKREQDKMREMFGTEPTELDFLVPANAGIMLMCTSREIEAPYLDYCSKLTNVKVVPVGAPFQDPLTEDIYDPELIAWLDTKPENSVVYVSFGSEYFLSREQIEEVARGLLESGANFIWVARFPKGEEQPLEDVLPEGFLEAAGDRGRVLDHLVPQAHILNHPSTGGFISHCGWNSVMESIDFGVPIIAMPMQWDQPINARLLVSLGVAVEIRRDEDGRIHAEDIARTIKEVIYGELGKKLRENVRALAARLRARREAEMDEAAAALRELCEKRRALK

SEQ ID NO: 671 - protein, 440 aa, synthetic construct
QKPKILMFPWLALGHVNPFLRIAKELADRGFEIYLVSTAPNLELAKKRIPEEYKDRIHLVEYELPELPELPPHLHTTNGLPPHLNGTLHKALKDAAPRLDEIVKELQPDLVLYDFLIPWAEKIAAAHGVPGVPLLTSGAALFSYFFNFLKRPGHEFPFPEIRLSKREQDKMREMFGTEPTELDFLVPANAGIMLMCTSRVIEKKYLDYCSKLTNVKVIPVGAPFQDPLTEDIYDPELIAWLDTKPENSVVYVSFGSEYFLSPEQIKEVAEGLLKSGANFIWVARFPKGEEQPLEDVLPEGFLEAAGDRGRVLDHLVPQAHILNHPATGAFISHCGWNSVMESIDFGVPIIAMPMQWDQPINARLLKSLGVAVEIERDEDGNIHADDIARTIKEMIYGELGKKLRENTKAIAAKLRAEREEEIDEAAAALRELCEKRRALK

SEQ ID NO: 672 - protein, 440 aa, synthetic construct
QTPKVLMFPWLALGHVNPFLRIAKELADRGFEIYLVSTPINLELAKKRIPEEYKDRIHLVEYELPELPELPPHLHTTNGLPPHLNGTLHKALKASAPRLDEIIAELQPDLVLYDFLIPWAAKLAEAHGVPAVPLLTSGAALFSYFFNFLKRPGHEFPFPEIRLSKREQDKMREMFGTEPTELDFLVPANAGLMLMCTSRVIEGKYLDYCSELTNVKVVPVGAPFQDPLTEDIYDPELIAWLDTKPENSVVYVSFGSEYFLSPEQIEEVARGLLESGVNFIWVARFPKGEEQNLEDVLPEGFLEAAGDRGRVLDHLVPQAHILNHPATGGFISHCGWNSVMESIDFGVPIIAMPMQWDQPINARLLVSLGVAVEIRRDEDGRIHADDIARVLREVIYGELGKKLREKTRRIAAELRARRQEEIDEAAAALRALCEARRALK

SEQ ID NO: 673 - protein, 440 aa, synthetic construct
QTPKILMFPWLALGHVNPFLRIAKQLADRGFHIYLVSTKINLELAEKRIPEEYKDKITLIEFELPELPELPPHLHTTNGLPPHLNGTLHKALKAAKPRFDEIVKEEQPDLVLYDFLIPWAAEIAEKHGIPAVPLLTSGAALFSYFFNFLKRPGHEFPFPAIRLSKREQDKMREMFGTEPTELDFLVPANAGIMLMCTSEVIEAPYLEYCQQLTNVEVVPVGAPFQDPLTEDIYDPELIAWLDTKAPGSVVYVSFGSEYFLSREQLHEVAEGLLESGVDFIWVARFPKGEEQPLEEVLPEGFLERIGDRGRVLDHLVPQAHILNHPATGGFISHCGWNSVMESIDFGVPIIAMPMQWDQPINARLLKSLGVAVEIRRDEDGRIHAEWIAETIREVIYGETGKTLRAQTAKIAAQLRAAREAEMDRAAARLRELCLARRALK

SEQ ID NO: 674 - protein, 440 aa, synthetic construct
QTPKILMFPWLALGHVNPFLRIAKQLADRGFHIYLVSTPINLELAKKRIPEEYKDKITLVEFELPELPELPPHLHTTNGLPPHLNGTLHKALKAAKPRLDEIVKELQPDLVLYDFLIPWAEEIAEKHGVPGVPLLTSGAALFSYFFNFLKRPGHEFPFPAIRLSKREQDKMREMFGTEPTELDFLVPANAGIMLMCTSEVIEAPYLEYCSKLTNVEVVPVGAPFQDPLTEDIYDPELIAWLDTKPPGSVVYVSFGSEYFLSEEQMHAVAEGLLESGAYFIWVARFPKGEERPLEEVLPEGFLERIGDRGRVLDHLVPQAHILNHPATGGFISHCGWNSVMESIDFGVPIIAMPMQWDQPINARLLVELGVAVEIPRDEDGRIHPEWIAETIREVLYGPLGETLRAQVAKLAAQLRAARQAEFDRAAERLRELCLARRALK

SEQ ID NO: 675 - protein, 440 aa, synthetic construct
QTPKILMFPWLALGHVNPFLRIAKQLADRGFHIYLVSTAPNLELAKKRIPEEYKDKITLVEFELPELPELPPHLHTTNGLPPHLNGTLHKALKEAAPRLDEIVKELQPDLVLYDFLIPWAEKIAEKHGVPGVPLLTSGAALFSYFFNFLKRPGHEFPFPEIRLSKREQDKMREMFGTEPTELDFLVPANAGIMLMCTSEVIEAPYIEYCQKLTNVEVIPVGAPFQDPLTEDIYDPELIAWLDTKPPGSVVYVSFGSEYFLSEEQMHAVAEGLLESGAYFIWVARFPKGEERPLEEVLPEGFLERIGDRGRVLDHLVPQAHILNHPATGAFISHCGWNSVMESIDFGVPIIAMPMQWDQPINARLLKSLGVAVEIPRDEDGNIHPEWIAETIREVIYGETGKTLRAQTAKIAAQLRAARQAEMDRAAERLLQLCLERRALK

SEQ ID NO: 676 - protein, 440 aa, synthetic construct
QTPKILMFPWLALGHVNPFLRIAKQLADRGFHIYLVSTKINLELAEKRIPEEYKDKITLVEYELPELPELPPHLHTTNGLPPHLNGTLHKALKAAAPRLDEIVKELQPDLVLYDFLIPWAAEIAEKHGVPAVPLLTSGAALFSYFFNFLKRPGHEFPFPAIRLSKREQDKMREMFGTEPTELDFLVPANAGVMLMCTSEVIEAPYLEYCRELTNVEVVPVGAPFQDPLTEDIYDPELIAWLDTKPAGSVVYVSFGSEYFLSEEQRHEIAEGLLESGAYFIWVARFPKGEEQPLEEVLPEGFLEAIGDRGRVLDHLVPQAHILNHPATGGFISHCGWNSVMESIDFGVPIIAMPMQWDQPINARLLKELGVAVEIPRDEDGRIHAEWIAETIREMIYGEKGKTLREQVAKISAQLRAARQAELDRAAERLRELCLRRRALK

SEQ ID NO: 677 - protein, 440 aa, synthetic construct
QTPKILMFPWLALGHVNPFLRIAKDLADRGFHIYLVSSKPNLELAKKRIPEKYKDKITLVEYELPELPELPPELHTTNGLPPHLNGTLHKALKASAPRLDEIVKELQPDLVLYDFLIPWAADIAEKHGVPAVPLLTSGAALFSYFFNFLKRPGHEFPFPEIRLSKREQDKMREMFGTEPTELDFLVPANAGIMLMCTSEVIEAPYIEYCQKLTNVEVVPVGAPFQDPLTEDIYDPELIAWLDTQPPGSVVYVSFGSEYFLSREQRHEVAEGLLESGANFIWVARFPKGEEQPLEEVLPEGFLERIGDRGRVLDHLVPQAHILNHPATGAFISHCGWNSVMESIDFGVPIIAMPMQWDQPINARLLVSLGVAVEIPRDEDGRIHAEWIAETIREVIYGETGKTLRAQVAKIAAQLRAAREAEIDRAAERLLQLCLERRALK

SEQ ID NO: 678 - protein, 440 aa, synthetic construct
QKPKILMFPWLALGHVNPFLRIAKRLADRGFHVYLVSTAPNLELAKKRIPEKYKDKITLVEYELPELPELPPHLHTTNGLPPHLNGTLHKALKEAAPRADEIVKELQPDLVLYDFLIPWLEKIAEKHGVPGVPLLTSGAALFSYFFNFLKRPGHEFPFPEIRLSKREQDKMREMFGTEPTELDFLVPANAGIMLMCTSRVIEKEYIEYCEKLTNVKVIPVGAPFQDPLTEDIYDPELIAWLDTKPPGSVVYVSFGSEYFLSREQLHEVAEGLLRSGAYFIWVARFPKGEEQPLEEVLPEGFLERIGDRGRVLDHLVPQAHILNHPATGAFISHCGWNSVMESIDFGVPIIAMPMQWDQPINARLLEKLGVAVIVRRDEDGRIHAEWIAETIREVIYGPTGEKLRAQTAKIAAQLRAEREAEFDEAAEELRALCEKRRALK

SEQ ID NO: 679 - protein, 440 aa, synthetic construct
QTPKILMFPWLALGHVNPFLRIAKELADRGFHIYLVNSAPNLELAKKRIPEKYKDKITLVEFELPELPELPPHLHTTNGLPPHLNGTLHKALKASLPRVDEIVRELQPDLVLYDFLIPEVEEIAEKHGIPGVPLLTSGAALFSYFFNFLKRPGHEFPFPEIRLSKREQDKMREMFGTEPTELDFLVPANAGVMLMCTSRVIEAPYIEYCEKLTNVEVVPVGAPFQDPLTEDIYDPELMAWLDTKPPGSVVYVSFGSEYFLSREQRHEVAEGLLRSGAYFIWVARFPKGEEQPLEEVLPEGFLERIGDRGRVLDHLVPQAHILNHPATGAFISHCGWNSVMESIDFGVPIIAMPMQWDQPINARLLESLGIAVIIPRDEDGRIHAEDIARTIREVIYGPLGKKLRAQVAKIAAQLRAARDAEMDEAAERLLQLCLERRALK

SEQ ID NO: 680 - protein, 440 aa, synthetic construct
QTPKILMFPWLALGHVNPFLRIAKELADRGFHVYLVSTKPNLELAKKRIPEKYKDRITLVEFELPELPELPPHLHTTNGLPPHLNGTLHKALKEAAPRADEIVAELQPDLVLYDFLIPWLEDIAAKHGVPGVPLLTSGAALFSYFFNFLKRPGHEFPFPAIRLSKREQDKMREMFGTEPTELDFLVPANAGVMLMCTSEVIEAPYIEYCEKLTNVEVIPVGAPFQDPLTEDIYDPELIAWLDTKPPGSVVYVSFGSEYFLSEEQLHEVAEGLLESGQYFIWVARFPKGEERPLEEVLPEGFLEAIGDRGRVLDHLVPQAHILNHPATGAFISHCGWNSVMESIDFGVPIIAMPMQWDQPINARLLVELGVAVEIPRDENGRIHRENIARTIREVIDGPLGKELRAKTAEIAAQLRAARQAEIDRAAERLRQLCEQRRALK

SEQ ID NO: 681 - protein, 440 aa, synthetic construct
QTPKILMFPWLALGHVNPFLRIAKQLADRGFHIYLVSTAINLELAEKRIPERYKDRITLVEFELPELPELPPHLHTTNGLPPHLNGTLHKALKAAAPRLDEIIAELQPDLLLYDFLIPWAADLAAKHGVPAVPLLTSGAALFSYFFNFLKRPGHEFPFPAIRLSKREQDKMREMFGTEPTELDFLVPANAGVMLMCTSEVIEAPYLEYCRELTNVEVVPVGAPFQDPLTEDIYDPELIAWLDTKAPGSVVYVSFGSEYFLSEEQRHEVARGLLLSGQNFIWVARFPKGEEQPLEEVLPEGFLEAIGDRGRVLDHLVPQAHILNHPATGGFISHCGWNSVMESIDFGVPIIAMPMQWDQPINARLLVELGVAVEVRRDEDGRIHAEWIAETIREVIDGERGKELRAQVAKIAAQLRAAREAELDRAAARLRALCEARRALK

SEQ ID NO: 682 - protein, 440 aa, synthetic construct
QRPRILMFPWLALGHVNPFLRIAKQLADRGFHIYLVSTAINLELAKKRIPEEYKDRITLVEYELPELPELPPHLHTTNGLPPHLNGTLHKALKEAAPRLDEIIAELQPDLVLYDFLIPWAEDLAAKHGVPGVPLLTSGAALFSYFFNFLKRPGHEFPFPAIRLSKREQDKMREMFGTEPTELDFLVPANAGVMLMCTSEVIEAPYLAYCQELTNVEVVPVGAPFQDPLTEDIYDPELIAWLDTQPPGSVVYVSFGSEYFLSPEQRAEVARGLLASGQNFIWVARFPKGEEQPLEEVLPEGFLEAIGDRGRVLDHLVPQAHILNHPATGGFISHCGWNSVMESIDFGVPIIAMPMQWDQPINARLLVEKGVAVEIRRDEDGRIHAEWIAETIREVINGPLGEKLRAQTAKIAAELRAARDATLDRAAARLRALCEARRALK

SEQ ID NO: 683 - protein, 440 aa, synthetic construct
QKPKILMFPWLALGHVNPFLRIAKQLADRGFHIYLVSTKINLELAKKRIPEEYKDKITLVEYELPELPELPPHLHTTNGLPPHLNGTLHKALKMARPRFDEIIRELDPDLVLYDFLIPWAEELAAKHGVPGVPLLTSGAALFSYFFNFLKRPGHEFPFPAIRLSKREQDKMREMFGTEPTELDFLVPANAGIMLMCTSRVIEAPYLEYCQKLTNVEVVPVGAPFQDPLTEDIYDPELIAWLDTKPPGSVVYVSFGSEYFLSREQMHEVARGLLESGQYFIWVARFPKGEEQPLEEVLPEGFLEAIGDRGRVLDHLVPQAHILNHPATGGFISHCGWNSVMESIDFGVPIIAMPMQWDQPINARLLVELGVAVEIRRDEDGRIHAEDIAETIRAVIDGPLGERLRAQVAKIAAELRAARDAEMDAAAERLRELCERRRALK

SEQ ID NO: 684 - protein, 440 aa, synthetic construct
QRPRILMFPWLALGHVNPFLRIAKQLADRGFEVYLVSTAPNLELAKKRIPEEYRDRIKLVEFELPELPELPPHLHTTNGLPPHLNGTLHKALKAAAPRLDEIVAELQPDLVLYDFLIPWAEEIAAKHGVPGVPLLTSGAALFSYFFNFLKRPGHEFPFPEIRLSKREQDKMREMFGTEPTELDFLVPANAGVMLMCTSEVIEKPYIEYCSKLTNVEVIPVGAPFQDPLTEDIYDPELIAWLDTKPPGSVVYVSFGSEYFLSREQMHEVAEGLLKSGAYFIWVARFPKGEEVPLEEVLPEGFLEAIGDRGRVLDHLVPQAHILNHPATGAFISHCGWNSVMESIDFGVPIIAMPMQWDQPINARLLKSLGVAVEIPRDEDGNIHAENIAKTIREVIYGELGKKLREQTAKIAAQLRAERQATFDRAAERLRELCEARRALK

SEQ ID NO: 685 - protein, 440 aa, synthetic construct
QRPVILMFPWLALGHVNPFLRIAKQLADRGFHVHLVSTKINLELAKKRIPPEYADRITLVEFELPELPELPPHLHTTNGLPPHLNGTLHKALKAAAPKLDEIVAELQPDLVLYDFLIPWAEKIAEKHGVPGVPLLTSGAALFSYFFNFLKRPGHEFPFPAIRLSKREQDKMREMFGTEPTELDFLVPANAGVMLMCTSEEIEAPYLAYCEKLTNVEVVPVGAPFQDPLTEDIYDPELIAWLDTKPPGSVVYVSFGSEYFLSPEQMRAVAEGLLASGAYFIWVARFPKGEERPLEEVLPEGFLERIGDRGRVLDHLVPQAHILNHPATGGFISHCGWNSVMESIDFGVPIIAMPMQWDQPINARLLVELGVAVEIPRDEDGRIHPEDIARTIREVLYGEKGKELRENVAKLAAKLRAARQAEFDRAAARLRALCEERRALK

SEQ ID NO: 686 - protein, 440 aa, synthetic construct
QTPKILMFPWLALGHVNPFLRIAKDLADRGFHIYLVNTAPNLELAKKRIPEEYKDKITLVEYELPELPELPPELHTTNGLPPHLNGTLHKALRAAAPRLDEIIKELQPDLVLYDFLIPFAEKLAEKHGVPGVPLLTSGAALFSYFFNFLKRPGHEFPFPEIRLSKREQDKMREMFGTEPTELDFLVPANAGVMLMCTSEVLEAPYIEYCEELTNVRVVPVGAPFQDPLTEDIYDPELMAWLDTKPPGSVVYVSFGSEYFLSREQIHEVAEGLLKSGQYFIWVARFPKGEEQPLEEVLPEGFLERIGDKGRVLDHLVPQAHILNHPATGAFISHCGWNSVMESIDFGVPIIAMPMQWDQPINARLLESLGVAVIIPRDEDGNIHADDIAKTIREVINGEKGKELRARVAEIAAQLRAARQAELDRAAAVLRQLCEARRALK

SEQ ID NO: 687 - protein, 440 aa, synthetic construct
QKPKILMFPWLALGHVNPFLRIAKQLADRGFEIYLVSTKINLELAKKRIPEEYKDKIKLVEYELPELPELPPHLHTTNGLPPHLNGTLHKALKMAKPRFDEIIKELQPDLVLYDFLIPWAEELAAEHGVPGVPLLTSGAALFSYFFNFLKRPGHEFPFPAIRLSKREQDKMREMFGTEPTELDFLVPANAGIMLMCTSEVIEAPYLAYCQKLTNVEVVPVGAPFQDPLTEDIYDPELIAWLDTKPPGSVVYVSFGSEYFLSREQMHEVAEGLLASGQYFIWVARFPKGEEQPLEEVLPEGFLERIGDRGRVLDHLVPQAHILNHPATGGFISHCGWNSVMESIDFGVPIIAMPMQWDQPINARLLVELGVAVEIPRDEDGRIHAEDIAATIRAVIDGPLGKELRARVAEIAAQLRAARQAEMDRAAARLRALCEARRALK

SEQ ID NO: 688 - protein, 440 aa, synthetic construct
QTPVILMFPWLALGHVNPFLRIAKQLADRGFHVYLVSTKPNLELAKKRIPEEYKDRITLVEFELPELPELPPHLHTTNGLPPHLNGTLHKALKASAPRFDEIVAELQPDLVLYDFLIPWAEAIAEKHGVPGVPLLTSGAALFSYFFNFLKRPGHEFPFPEIRLSKREQDKMREMFGTEPTELDFLVPANAGVMLMCTSRAIEAPYIEYCEKLTNVRVVPVGAPFQDPLTEDIYDPELIAWLDTKPPGSVVYVSFGSEYFLSREQMHEVAEGLLKSGKYFIWVARFPKGEEQPLEEVLPEGFLERIGDRGRVLDHLVPQAHILNHPATGAFISHCGWNSVMESIDFGVPIIAMPMQWDQPINARLLVSLGVAVEIRRDEDGRIHADWIAETIREVIDGPLGKELRAQTAKLAAQLRAERQAEFDEAAALLRELCEARRALK

SEQ ID NO: 689 - protein, 440 aa, synthetic construct
QRPRILMFPWLALGHVNPFLRIAKQLADRGFHIYLVSTPINLELAKKRIPAEYADKITLVEFELPELPELPPHLHTTNGLPPHLNGTLHKALKAAAPRLDEIVAELQPDLVLYDFLIPWAEKIAEKHGVPGVPLLTSGAALFSYFFNFLKRPGHEFPFPAIRLSKREQDKMREMFGTEPTELDFLVPANAGVMLMCTSEAIEGPYLEYCSKLTNVEVVPVGAPFQDPLTEDIYDPELIAWLDTKPPGSVVYVSFGSEYFLSREQMHEVAEGLLRSGAYFIWVARFPKGEERPLEEVLPEGFLEAIGDRGRVLDHLVPQAHILNHPATGGFISHCGWNSVMESIDFGVPIIAMPMQWDQPINARLLVELGVAVEIPRDEDGRIHAEDIARTIREVIYGEKGKELRAKVKELSAKLRAQRQAEVDRAAARLRELCERRRALK

SEQ ID NO: 690 - protein, 440 aa, synthetic construct
QKPKILMFPWLALGHVNPFLRIAKQLADRGFEIYLVSTKINLELAKKRIPEKYKDKIHLVEYELPELPELPPHLHTTNGLPPHLNGTLHKALKMAAPRFDEIVKELQPDLVLYDFLIPWAEEIAAKHGVPGVPLLTSGAALFSYFFNFLKRPGHEFPFPAIRLSKREQDKMREMFGTEPTELDFLVPANAGIMLMCTSEVIEKEYLEYCQKLTNVEVVPVGAPFQDPLTEDIYDPELIAWLDTKPPGSVVYVSFGSEYFLSREQMHEVAEGLLESGQYFIWVARFPKGEEQPLEEVLPEGFLERIGDRGRVLDHLVPQAHILNHPATGGFISHCGWNSVMESIDFGVPIIAMPMQWDQPINARLLVSLGVAVEIPRDEDGRIHRRWIAETIRAVITGETGKTLRAQVAAIAAQLRAARDAEMDRAAARLRQLCEARRALK

SEQ ID NO: 691 - protein, 440 aa, synthetic construct
QTPKILMFPWLALGHVNPFLRIAKQLADRGFHIYLVSTAINLELAKKRIPEEYKDKITLVEYELPELPELPPHLHTTNGLPPHLNGTLHKALKMAAPRFAEIVAELQPDLVLYDFLIPWAEEIAAAHGVPGVPLLTSGAALFSYFFNFLKRPGHEFPFPAIRLSKREQDKMREMFGTEPTELDFLVPANAGIMLMCTSRVIEAPYLEYCQKLTNVEVVPVGAPFQDPLTEDIYDPELIAWLDTKAPGSVVYVSFGSEYFLSREQMHEVAEGLLASGQDFIWVARFPKGEEQPLEEVLPEGFLEAIGDRGRVLDHLVPQAHILNHPATGGFISHCGWNSVMESIDFGVPIIAMPMQWDQPINARLLVELGVAVEIPRDEDGRIHAEDIARTIREVINGETGKTLRAQVAKIAAQLRAAREAEMDEAAERLRQLCEQRRALK

SEQ ID NO: 692 - protein, 440 aa, synthetic construct
QKPKILMFPWLALGHVNPFLRIAKDLADRGFHIYLVSTKPNLELAKKRIPEEYKDKITLVEFELPELPELPPHLHTTNGLPPHLNGTLHKALKEAAPRLDEIIAELQPDLVLYDFLIPWVEASAEKHGVPGVPLLTSGAALFSYFFNFLKRPGHEFPFPEIRLSKREQDKMREMFGTEPTELDFLVPANAGVMLMCTSRVIEAKYIEYCEKLTNVKVIPVGAPFQDPLTEDIYDPELIAWLDTKPPGSVVYVSFGSEYFLSPEQRHQVAEGLLESGAYFIWVARFPKGEEVPLEEVLPEGFLEAIGDRGRVLDHLVPQAHILNHPATGAFISHCGWNSVMESIDFGVPIIAMPMQWDQPINARLLESLGVAKIIPRDENGNIHAEDIAATIREVLYGPLGKELRAKVKEIAAQLRAERQAEIDEAAATLLELCEKRRALK

SEQ ID NO: 693 - protein, 440 aa, synthetic construct
QTPKILMFPWLALGHVNPFLRIAKQLADRGFHVYLVSTPINLELAKKRIPEEYKDKITLVEYKLPELPELPPHLHTTNGLPPHLNGTLHKALKMAAPRFDEIVRELQPDLVLYDFLIPWAEAIAAKHGVPGVPLLTSGAALFSYFFNFLKRPGHEFPFPAIRLSKREQDKMREMFGTEPTELDFLVPANAGVMLMCTSRVIEAPYLEYCQELTNVRVVPVGAPFQDPLTEDIYDPELIAWLDTKPPGSVVYVSFGSEYFLSREQMHEVAEGLLESGAYFIWVARFPKGEERPLEEVLPEGFLERIGDRGRVLDHLVPQAHILNHPATGGFISHCGWNSVMESIDFGVPIIAMPMQWDQPINARLLVELGVAVEIPRDEDGRIHARWIAETIREVIYGEKGKELRAKVAEIAAQLRAERQAEMDEAAALLRALCEARRALK

SEQ ID NO: 694 - protein, 440 aa, synthetic construct
QTPKILMFPWLALGHVNPFLRIAKQLADRGFEIYLVSTPINLELAKKRIPEKYKNKIKLVEFELPELPELPPHLHTTNGLPPHLNGTLHKALKAAAPRLDEIVKELQPDLVLYDFLIPWAEKIAEKHGVPGVPLLTSGAALFSYFFNFLKRPGHEFPFPAIRLSKREQDKMREMFGTEPTELDFLVPANAGVMLMCTSEAIEAPYLAYCSELTNVEVVPVGAPFQDPLTEDIYDPELIAWLDTKPPGSVVYVSFGSEYFLSEEQMHEVAEGLLASGQYFIWVARFPKGEERPLEEVLPEGFLERIGDRGRVLDHLVPQAHILNHPATGGFISHCGWNSVMESIDFGVPIIAMPMQWDQPINARLLVELGVAVEIPRDEDGRIHAEDIAKTIREVINGETGKTLRAQVAKLAAELRAAREAEMDRAAARLRELCERRRALK

SEQ ID NO: 695 - protein, 440 aa, synthetic construct
QKPKILMFPWLALGHVNPFLRIAKQLADRGFEIYLVSTAINLELAKKRIPEKYKDKIHLVEYELPELPELPPHLHTTNGLPPHLNGTLHKALKMAKPRFDEIVKELQPDLVLYDFLIPWAEEIAEKHGIPGVPLLTSGAALFSYFFNFLKRPGHEFPFPAIRLSKREQDKMREMFGTEPTELDFLVPANAGIMLMCTSRVIEAPYLEYCQKLTNVEVVPVGAPFQDPLTEDIYDPELIAWLDTQPPGSVVYVSFGSEYFLSREQMHEVARGLLESGQNFIWVARFPKGEEQPLEEVLPEGFLEAIGDRGRVLDHLVPQAHILNHPATGGFISHCGWNSVMESIDFGVPIIAMPMQWDQPINARLLVELGVAVEIPRDEDGRIHAEDIARTIREVIDGPLGETLRAQVAAIAAQLRAARQAEMDEAAERLLALCEKRRALK

SEQ ID NO: 696 - protein, 440 aa, synthetic construct
QTPKILMFPWLALGHVNPFLRIAKELAKRGFEIYLVNSAPNLELAKKRIPEEYKDKIHLVEYKLPELPELPPHLHTTNGLPPHLNGTLHKALRAAAPRLDEIIKELQPDLVLYDFLIPFAEDIAAKHGVPGVPLLTSGAALFSYFFNFLKRPGHEFPFPEIRLSKREQDKMREMFGTEPTELDFLVPANAGIMLMCTSEVLEAEYIKYCEKLTNVEVVPVGAPFQDPLTEDIYDPELMAWLDTKPPGSVVYVSFGSEYFLSREQLHEVARGLLESGAYFIWVARFPKGEEQPLEEVLPEGFLEAIGDRGRVLDHLVPQAHILNHPATGAFISHCGWNSVMESIDFGVPIIAMPMQWDQPINARLLERLGVAVIIPRDEDGRIHAEDIARTIREVLYGETGKTLRAQVAKISAQLHAAREAELDRAAERLRQLCEQRRALK

SEQ ID NO: 697 - protein, 440 aa, synthetic construct
QRPRILMFPWLALGHVNPFLRIAKQLADRGFHIYLVSTKINLELAKKRIPERYKDRITLVEYELPELPELPPHLHTTNGLPPHLNGTLHKALKAARPRLAEIVAELQPDLLLYDFLIPWAAEIAAAHGVPAVPLLTSGAALFSYFFNFLKRPGHEFPFPAIRLSKREQDKMREMFGTEPTELDFLVPANAGVMLMCTSRVIEAPYLEYCQQLTNVEVVPVGAPFQDPLTEDIYDPELIAWLDTKPPGSVVYVSFGSEYFLSPEQRAEVARGLLASGQDFIWVARFPKGEEQPLEEVLPEGFLEAIGDRGRVLDHLVPQAHILNHPATGGFISHCGWNSVMESIDFGVPIIAMPMQWDQPINARLLKELGVAVEIPRDEDGRIHADDIAATIREVINGPKGKELRAKVAEIAAQLRAARQAELDEAAARLRALCEARRALK

SEQ ID NO: 698 - protein, 440 aa, synthetic construct
QTPKILMFPWLALGHVNPFLRIAKELADRGFHVYLVSTAPNLELAKKRIPEKYKDKITLVEFELPELPELPPHLHTTNGLPPHLNGTLHKALKASAPRADEIVKELQPDLVLYDFLIPWLEEIAAKHGVPGVPLLTSGAALFSYFFNFLKRPGHEFPFPEIRLSKREQDKMREMFGTEPTELDFLVPANAGVMLMCTSEAIEAPYIELCQKLTNVEVVPVGAPFQDPLTEDIYDPELIAWLDTKPPGSVVYVSFGSEYFLSEEQRHEVAEGLLRSGAYFIWVARFPKGEEVPLEEVLPEGFLERIGDRGRVLDHLVPQAHILNHPATGAFISHCGWNSVMESIDFGVPIIAMPMQWDQPINARLLKSLGVAVEIPRDEDGRLHAEWIAETIRAVIHGPLGKTLRAQTAKLAAQLRAEREATFDRAAERLRQLCEERRALK

SEQ ID NO: 699 - protein, 440 aa, synthetic construct
QKPKILMFPWLALGHVNPFLRIAKQLADRGFHIYLVSTAINLELAKKRIPEKYKDKITLVEFELPELPELPPHLHTTNGLPPHLNGTLHKALKAAAPRLREIIKELQPDLLLYDFLIPWAADLAEEEGVPAVPLLTSGAALFSYFFNFLKRPGHEFPFPAIRLSKREQDKMREMFGTEPTELDFLVPANAGIMLMCTSEVIEAPYLRYCEELTNVEVVPVGAPFQDPLTEDIYDPELIAWLDTQPPGSVVYVSFGSEYFLSREQIHEVAEGLLASGQNFIWVARFPKGEEQPLEEVLPEGFLERIGDRGRVLDHLVPQAHILNHPATGGFISHCGWNSVMESIDFGVPIIAMPMQWDQPINARLLVEKGVAVEIPRDEDGRIHAEDIAATIRAVINGPTGKTLRAQVAKIAAQLRAARDAELDRAAERLRELCERRRALK

SEQ ID NO: 700 - protein, 440 aa, synthetic construct
QTPKILMFPWLALGHVNPFLRIAKDLADRGFHIYLVSSAPNLELAKKRIPEKYKDKITLVEYELPELPELPPELHTTNGLPPHLNGTLHKALKASAPRLDEIIKELQPDLLLYDFLIPWAEEIAEKHGVPGVPLLTSGAALFSYFFNFLKRPGHEFPFPEIRLSKREQDKMREMFGTEPTELDFLVPANAGIMLMCTSEVIEAPYIEYCQKLTNVEVVPVGAPFQDPLTEDIYDPELIAWLDTKPPGSVVYVSFGSEYFLSREQLHEVARGLLESGQYFIWVARFPKGEEQPLEEVLPEGFLEAIGDRGRVLDHLVPQAHILNHPATGGFISHCGWNSVMESIDFGVPIIAMPMQWDQPINARLLVSLGVAVEIPRDEDGRIHAEDIAATIREVINGETGKTLRAQVAKIAAQLRAARQAELDRAAARLRALCEKRRALK

SEQ ID NO: 701 - protein, 440 aa, synthetic construct
QRPKILMFPWLALGHVNPFLRIAKQLADRGFHVYLVSTAINLELAKKRIPEEYADRITLVEFELPELPELPPHLHTTNGLPPHLNGTLHKALKAAAPRLDEIVAELQPDLVLYDFLIPWAEAIAAAHGVPGVPLLTSGAALFSYFFNFLKRPGHEFPFPAIRLSKREQDKMREMFGTEPTELDFLVPANAGVMLMCTSEVIEAPYLAYCEKLTNVRVVPVGAPFQDPLTEDIYDPELIAWLDTKPPGSVVYVSFGSEYFLSREQMHEVARGLLESGVYFIWVARFPKGEEVPLEEVLPEGFLEAIGDRGRVLDHLVPQAHILNHPATGGFISHCGWNSVMESIDFGVPIIAMPMQWDQPINARLLVELGVAVEIRRDEDGRIHAEWIAETIREMIYGPTGETLRAQVAAIAAQLRAAREAEFDRAAELLRQLCLERRALK

SEQ ID NO: 702 - protein, 440 aa, synthetic construct
QKPKILMFPWLALGHVNPFLRIAKQLADRGFEIYLVSTKINLELAKKRIPEEYKDKIKLVEYELPELPELPPHLHTTNGLPPHLNGTLHKALKAAAPKLDEIIKELQPDLVLYDFLIPWAAELAEKHGVPAVPLLTSGAALFSYFFNFLKRPGHEFPFPAIRLSKREQDKMREMFGTEPTELDFLVPANAGVMLMCTSRVIEAPYLEYCEKLTNVEVVPVGAPFQDPLTEDIYDPELIAWLDTQPPGSVVYVSFGSEYFLSPEQRHEVARGLLESGQNFIWVARFPKGEEQPLEEVLPEGFLERIGDRGRVLDHLVPQAHILNHPATGGFISHCGWNSVMESIDFGVPIIAMPMQWDQPINARLLKELGVAVEIPRDEDGRIHAEDIAETIRAVINGETGKTLRARVAEISAQLRAAREAELDEAAERLRELCEQRRALK

SEQ ID NO: 703 - protein, 440 aa, synthetic construct
QKPKILMFPWLALGHVNPFLRIAKQLADRGFEIYLVSTPINLELAKKRIPEKYKDKIKLVEYELPELPELPPHLHTTNGLPPHLNGTLHKALKMSAPRFDEIVKELQPDLVLYDFLIPWAEKIAEKHGVPGVPLLTSGAALFSYFFNFLKRPGHEFPFPAIRLSKREQDKMREMFGTEPTELDFLVPANAGIMLMCTSEVIEAPYLEYCQKLTNVEVVPVGAPFQDPLTEDIYDPELIAWLDTKAPGSVVYVSFGSEYFLSREQMHEVAEGLLKSGANFIWVARFPKGEEQPLEEVLPEGFLEAIGDRGRVLDHLVPQAHILNHPATGGFISHCGWNSVMESIDFGVPIIAMPMQWDQPINARLLVELGVAVEIPRDEDGRIHAEDIARTIREVLYGETGKELRARVAEIAAQLRAARQAEMDRAAARLRELCEERRALK

SEQ ID NO: 704 - protein, 440 aa, synthetic construct
QTPKILMFPWLALGHVNPFLRIAKQLADRGFHIYLVSTAINLELAKKRIPEEYKDKITLVEYELPELPELPPHLHTTNGLPPHLNGTLHKALKAAAPRLDEIIKELQPDLVLYDFLIPWAAEIAEKHGVPAVPLLTSGAALFSYFFNFLKRPGHEFPFPAIRLSKREQDKMREMFGTEPTELDFLVPANAGIMLMCTSEVIEKPYLEYCEKLTNVEVVPVGAPFQDPLTEDIYDPELIAWLDTKPPGSVVYVSFGSEYFLSREQIHEVAEGLLESGVYFIWVARFPKGEEQPLEEVLPEGFLERIGDRGRVLDHLVPQAHILNHPATGGFISHCGWNSVMESIDFGVPIIAMPMQWDQPINARLLVELGVAVEIPRDEDGRIHAEDIARTIREVIYGPRGEELRAQVAKIAAQLRAAREAEMDRAAARLRELCEKRRALK

SEQ ID NO: 705 - protein, 440 aa, synthetic construct
QKPKILMFPWLALGHVNPFLRIAKQLADRGFHIYLVSTAPNLELAKKRIPEEYKDKITLVEYELPELPELPPHLHTTNGLPPHLNGTLHKALKAAAPRLDEIVKELQPDLVLYDFLIPWAEAIAEKHGVPGVPLLTSGAALFSYFFNFLKRPGHEFPFPEIRLSKREQDKMREMFGTEPTELDFLVPANAGVMLMCTSEVIEAPYIAYCQELTNVEVVPVGAPFQDPLTEDIYDPELIAWLDTKPPGSVVYVSFGSEYFLSREQMHEVAEGLLESGAYFIWVARFPKGEERPLEEVLPEGFLERIGDRGRVLDHLVPQAHILNHPATGGFISHCGWNSVMESIDFGVPIIAMPMQWDQPINARLLKSLGVAVEIPRDEDGRIHAEDIARTIREVIYGPTGEKLRAQTAKLAAQLRAAREAEMDRAAARLRELCAARRALK

SEQ ID NO: 706 - protein, 440 aa, synthetic construct
QKPKILMFPWLALGHVNPFLRIAKQLADRGFHVYLVSTKINLELAKKRIPEEYKDKITLVEFELPELPELPPHLHTTNGLPPHLNGTLHKALKAAAPKLDEIVKELQPDLVLYDFLIPWAEKIAEKHGVPGVPLLTSGAALFSYFFNFLKRPGHEFPFPAIRLSKREQDKMREMFGTEPTELDFLVPANAGIMLMCTSRVIEAPYLEYCQKLTNVEVVPVGAPFQDPLTEDIYDPELIAWLDTKPPGSVVYVSFGSEYFLSEEQMHEVAEGLLRSGAYFIWVARFPKGEERPLEEVLPEGFLERIGDRGRVLDHLVPQAHILNHPATGGFISHCGWNSVMESIDFGVPIIAMPMQWDQPINARLLVELGVAVEIPRDEDGRIHAEDIARTIREVIYGPTGEKLRAQVAKIAAQLRAAREAEMDEAAERLRQLCEQRRALK

SEQ ID NO: 707 - protein, 440 aa, synthetic construct
QPPKILMFPWLALGHVNPFLRIAKQLADRGFKIYLVSTAINLELAKKRIPEKYKDKIHLVELRLPELPELPPHYHTTNGLPPHLNKTLHKALKASAPRFREIVKEIKPDLVLYDFLVPWAEKVAAEHGIPAVPLLTSGAALFSYFFNFLKRPGEEFPFPAIRLSKREQDKMREMFGTEPPELDFLAPAAAGIMLMCTSRVIEGKYLDYCQELTGVRVVPVGAPFQDPLTEDIYDPELIRWLDTKPEGSVVYVSFGSEYFLSREDMEAVARGLEASGANFIWVARFPKGEERRLEDVLPEGFLEAVGDRGRVLDHLVPQAHILNHPATGGFISHCGWNSVMESIDFGVPIIAMPMQWDQPINARLLVRLGVAVEIRRDEDGRVHPEDIARVIKEVISGELGEKLREKVRRISARLRARREEEMDAAAARLRELCRNRRALK

SEQ ID NO: 708 - protein, 440 aa, synthetic construct
QPPKVLMFPWLALGHVNPFLRIAKQLAKRGFKIYLVSTAINLELAKKRIPEEYKDKIHLVEYRLPELPELPPHLHTTNGLPPHLNKTLHKALKASAPRFREQVKEIKPDLVLYDFLIPWAEKVAAEHGVPAVPLLTSGAALFSYFFNFLKRPGEEFPFPAIRLSKREQDKMREMFGTEPPELDFLAPAAAGIMLMCTSRVIEGKYLDYCQKLTGVRVVPVGPPFQDPLTEDIYDPELIRWLDTKPEGSVVYVSFGSEYFLSREDMEAVARGLEESGAYFIWVARFPKGEERPLEDVLPKGFLEAVGDRGRVLDHLVPQAHILNHPATGGFISHCGWNSVMESIDFGVPIIAMPMQWDQPINARLLVRLGVAVEIRRDEDGRVHPEDIARVIREVISGELGEELRKKVRRISARLRARREEEMDEAAARLRELCRNRRALK

SEQ ID NO: 709 - protein, 440 aa, synthetic construct
QPPKVLMFPWLALGHVNPFLRIAKQLADRGFEIYLVSTAINLELAKKRIPEKYKDKIHLVELRLPELPELPPHLHTTNGLPPHLNKTLHKALKMSAPRFREQVKEIKPDLVLYDFLIPWAEKVAAEHGVPAVPLLTSGAALFSYFFNFLKRPGEEFPFPAIRLSKREQDKMREMFGTEPPELDFLVPAAAGIMLMCTSRVIEGKYLDYCQELTGVEVVPVGPPFQDPLTEDIYDPELIRWLDTKPEGSVVYVSFGSEYFLSREQMEAVARGLEESGANFIWVARFPKGEERRLEDVLPKGFLEAVGDRGRVLDHLVPQAHILNHPATGGFISHCGWNSVMESIDFGVPIIAMPMQWDQPINARLLVRLGVAVEIRRDEDGRIHPEDIARVLKEVIYGELGKKLREKVRRISARLRARREEEMDEAAARLRELCRNRRALK

SEQ ID NO: 710 - protein, 440 aa, synthetic construct
QPPKILMFPWLALGHVNPFLRIAKQLADRGFKIYLVSTAINLEMAKKRIPEKYKDRIHLVELRLPELPELPPHLHTTNGLPPHLNKTLHKALKASAPRFREQLKEIKPDLVLYDFLVPWAEKVAAAHGIPAVPLLTSGAALFSYFFNFLKRPGEEFPFPAIRLSKREQDKMREMFGTEPPELDFLVPAAAGVMLMCTSRVIEGEYLDYCQKLTGVEVVPVGAPFQDPLTEDIYDPELIRWLDTKPERSVVYVSFGSEYFLSREDMEAVARGLEASGAYFIWVARFPKGEERPLEDVLPEGFLEAVGDRGRVLDHLVPQAHILNHPATGGFISHCGWNSVMESIDFGVPIIAMPMQWDQPINARLLVRLGVAVEIRRDEDGRVHPEDIARVIREVIFGELGKELREKVARISARLRARREEEMDEAAARLRELCRNRRALK

SEQ ID NO: 711 - protein, 440 aa, synthetic construct
QPPKILMFPWLALGHVNPFLRIAKQLADRGFKIYLVSTAINLEMAKKRIPEKYKDRIHLVELRLPELPELPPHYHTTNGLPPHLNKTLHKALKASAPRFREQVKEIKPDLVLYDFLIPWAEKVAAEHGVPAVPLLTSGAALFSYFFNFLKRPGEEFPFPAIRLSKREQDKMREMFGTEPPEEDFLVPAAAGVMLMCTSRVIEGKYLDYCQELTGVRVVPVGPPFQDPLTEDIYDPELIRWLDTKPEGSVVYVSFGSEYFLSREDMEAVARGLEESGANFIWVARFPKGEERRLEDVLPEGFLERVGDRGRVLDHLVPQAHILNHPATGGFISHCGWNSVMESIDFGVPIIAMPMQWDQPINARLLVELGVAVEIRRDEDGRVHPEDIARVIREVISGELGKELREKVARISARLRARREEEMDAAAARLRALCRNRRAYK

SEQ ID NO: 712 - protein, 440 aa, synthetic construct
QPPKILMFPWLALGHVNPFLRIAKQLAKRGFKIYLVSTKINLEMIKKRIPEKYKDKIHLVELRLPELPELPPHYHTTNGLPPHLNKTLHKALKASAPEFREIVKEIKPDLVLYDFLVPWAEKVAAKHGIPAVPLLTSGAALFSYFFNFLKRPGEEFPFPAIRLSKREQDKMREMFGTEPPEEDFLAPAAAGVMLMCTSRVIEGKYLDYCQELTGVEVVPVGPPFQDPLTEDIYDPELIRWLDTKPEGSVVYVSFGSEYFLSREDMEAVARGLEASGANFIWVARFPKGEERPLEDVLPKGFLERVGDRGRVLDHLVPQAHILNHPATGGFISHCGWNSVMESIDFGVPIIAMPMQWDQPINARLLVDLGVAVEIRRDEDGRVHPEDIARVIREVISGPLGEELREKVRRISARLRARREEEMDEAAARLRELCRNRRALK

SEQ ID NO: 713 - protein, 440 aa, synthetic construct
QPPKILMFPWLGLGHVNPFLRIAKQLADRGFKIYLVSTAINLELAKKRIPEKYKDRIHLVEYRLPELPELPPHYHTTNGLPPHLNKTLHKALKASAPRFREQVKEIKPDLVLYDFLIPWAEKVAAAHGVPAVPLLTSGAALFSYFFNFLKRPGEEFPFPAIRLSKREQDKMREMFGTEPPELDFLVPAAAGVMLMCTSRVIEGEYLAYCQKLTGVRVVPVGPPFQDPLTEDIYDPELIRWLDTKPEGSVVYVSFGSEYFLSREDMEAVARGLEESGAYFIWVARFPKGEERRLEDVLPEGFLEAVGDRGRVLDHLVPQAHILNHPATGGFISHCGWNSVMESIDFGVPIIAMPMQWDQPINARLLVRLGVAVEIPRDEDGRIHPEDIARVIKEVISGELGKELREKVRRISARLRARREEEMDAAAARLRELCLNRRALK

SEQ ID NO: 714 - protein, 440 aa, synthetic construct
QPPKVLMFPWLALGHVNPFLRIAKQLADRGFKIYLVSTAINLEMAKKRIPEKYKDKIHLVEYRLPELPELPPHLHTTNGLPPHLNKTLHKALKASAPRFREIVKEIKPDLVLYDFLIPWAEKVAAEHGIPAVPLLTSGAALFSYFFNFLKRPGEEFPFPAIRLSKREQDKMREMFGTEPPEEDFLVPAAAGVMLMCTSRVIEGKYLDYCQELTGVEVVPVGAPFQDPLTEDIYDPELIRWLDTKPERSVVYVSFGSEYFLSREDMEAVARGLEESGAYFIWVARFPKGEERPLEDVLPKGFLEAVGDRGRVLDHLVPQAHILNHPATGGFISHCGWNSVMESIDFGVPIIAMPMQWDQPINARLLVRLGVAVEIRRDEDGRIHPEDIARVIKDVISGELGKKLREKVRRISARLRARREEEMDAAAARLRALCRNRRALK

SEQ ID NO: 715 - protein, 440 aa, synthetic construct
QPPKVLMFPWLALGHVNPFLRIAKQLADRGFKIYLVSTKINLELAKKRIPEKYKDKIHLVELALPELPELPPHLHTTNGLPPHLNKTLHKALKASAPRFREIVKEIKPDLVLYDFLVPWAEKVAAELGIPAVPLLTSGAALFSYFFNFLKRPGEEFPFPAIRLSKREQDKMREMFGTEPPELDFLAPAAAGIMLMCTSRVIEGKYLAYCQELTGVEVVPVGPPFQDPLTEDIYDPELIRWLDTKPEGSVVYVSFGSEYFLSREDMEAVARGLEESGAYFIWVARFPKGEERRLEDVLPKGFLERVGDRGRVLDHLVPQAHILNHPATGGFISHCGWNSVMESIDFGVPIIAMPMQWDQPINARLLVRLGVAVEIRRDEDGRIHPEDIARVLKEVISGELGEELRKKVARISARLRARREEEMDAAAARLRELCRNRRAYK

SEQ ID NO: 716 - protein, 440 aa, synthetic construct
QPPKVLMFPWLGLGHVNPFLRIAKQLAKRGFKIYLVSTAINLELIKKRIPEKYKDKIHLVEYRLPELPELPPHYHTTNGLPPHLNKTLHKALKAAAPEFRKILKEIKPDLVLYDFLVPWAEKVAAEHGIPAVPLLTSGAALFSYFFNFLKRPGEEFPFPAIRLSKREQDKMREMFGTEPPELDFLAPAAAGVMLMCTSRVIEGKYLDYCTELTGVRVVPVGPPFQDPLTEDIYDPELIRWLDTKPEGSVVYVSFGSEYFLSREDMEAVARGLEESGAYFIWVARFPKGEERRLEDVLPEGFLEAVGDRGRVLDHLVPQAHILNHPATGGFISHCGWNSVMESIDFGVPIIAMPMQWDQPINARLLVRLGVAVEIRRDEDGRVHPEDIARVIREVISGELGEKLRKKVRRISARLRARREEEMDEAAARLRELCRNRRAYK

SEQ ID NO: 717 - protein, 440 aa, synthetic construct
QPPKILMFPWLALGHVNPFLRIAKQLADRGFKIYLVSTAINLEMAKKRIPEEYKDKIHLVELRLPELPELPPHLHTTNGLPPHLNKTLHKALKMAAPRFREQVKEIKPDLVLYDFLIPWAEKVAAEHGVPAVPLLTSGAALFSYFFNFLKRPGEEFPFPAIRLSKREQDKMREMFGTEPPEEDFLVPAAAGIMLMCTSRVIEGKYLDYCQKLTGVRVVPVGAPFQDPLTEDIYDPELIRWLDTKPEGSVVYVSFGSEYFLSREDMEAVARGLEASGAYFIWVARFPKGEERRLEDVLPKGFLEAIGDRGRVLDHLVPQAHILNHPATGGFISHCGWNSVMESIDFGVPIIAMPMQWDQPINARLLVRLGVAVEIRRDEDGRVHPDDIARVIREVISGELGKELREKVARISARLRAEREEEMDAAAARLRELCRNRRALK

SEQ ID NO: 718 - protein, 440 aa, synthetic construct
QPPKILMFPWLALGHVNPFLRIAKQLADRGFKIYLVSTAINLEMAKKRIPEKYKDRIHLVELRLPELPELPPHYHTTNGLPPHLNKTLHKALKASAPRFREQVKEIKPDLVLYDFLIPWAEKVAAAHGIPAVPLLTSGAALFSYFFNFLKRPGEEFPFPAIRLSKREQDKMREMFGTEPPEEDFLAPAAAGIMLMCTSRVIEGKYLDYCQELTGVEVVPVGPPFQDPLTEDIYDPELIRWLDTKPERSVVYVSFGSEYFLSREDMEEVARGLEESGANFIWVARFPKGEERPLEDVLPKGFLEAVGDRGRVLDHLVPQAHILNHPATGGFISHCGWNSVMESIDFGVPIIAMPMQWDQPINARLLVRLGVAVEIRRDEDGRIHPDDIARVIKEVISGELGEKLREKVARIAARLRARREEEMDEAAARLRALCRNRRAYK

SEQ ID NO: 719 - protein, 440 aa, synthetic construct
QPPKVLMFPWLGLGHVNPFLRIAKQLAKRGFKIYLVSTAINLELIKKRIPEKYKDKIHLVELRLPELPELPPHLHTTNGLPPHLNKTLHKALKASAPRFREILKEIKPDLVLYDFLVPWAEKVAAEHGIPAVPLLTSGAALFSYFFNFLKRPGEEFPFPAIRLSKREQDKMREMFGTEPPEEDFLVPAAAGIMLMCTSRVIEGKYLDYCQKLTGVRVVPVGPPFQDPLTEDIYDPELIRWLDTKPERSVVYVSFGSEYFLSREDMEAVARGLEASGAYFIWVARFPKGEERRLEDVLPEGFLEAVGDRGRVLDHLVPQAHILNHPATGGFISHCGWNSVMESIDFGVPIIAMPMQWDQPINARLLVRLGVAVEIRRDEDGRIHPEDIARVIKEVISGPLGEELREKVRRISARLRARREEEMDEAAARLRALCRNRRAYK

SEQ ID NO: 720 - protein, 440 aa, synthetic construct
QPPKILMFPWLGLGHVNPFLRIAKQLADRGFKIYLVSTAINLELAKKRIPEEYKDKIHLVELRLPELPELPPHYHTTNGLPPHLNKTLHKALKASAPEFRKIVKEIKPDLVLYDFLIPWAEKVAAEHGVPAVPLLTSGAALFSYFFNFLKRPGEEFPFPAIRLSKREQDKMREMFGTEPPEEDFLVPAAAGIMLMCTSRVIEGKYLDYCQELTGVEVVPVGPPFQDPLTEDIYDPELIRWLDTKPEGSVVYVSFGSEYFLSREDMEAVARGLEASGANFIWVARFPKGEERPLEDVLPEGFLEAVGDRGRVLDHLVPQAHILNHPATGGFISHCGWNSVMESIDFGVPIIAMPMQWDQPINARLLVRLGVAVEIRRDEDGRVHPEDIARVIREVISGELGEELRKKVRRISARLRAEREREMDEAAERLRELCRNRRAYK

SEQ ID NO: 721 - protein, 440 aa, synthetic construct
QPPKILMFPWLALGHVNPFLRIAKQLADRGFKIYLVSTAINLEMAKKRIPEKYKDKIHLVELRLPELPELPPHYHTTNGLPPHLNKTLHKALKASAPRFREIVKEIKPDLVLYDFLVPWAEKVAAEHGVPAVPLLTSGAALFSYFFNFLKRPGEEFPFPAIRLSKREQDKMREMFGTEPPELDFLVPAAAGVMLMCTSRVIEGKYLDYCQKLTGVRVVPVGPPFQDPLTEDIYDPELIRWLDTKPEGSVVYVSFGSEYFLSREDMEAVARGLLESGAYFIWVARFPKGEERRLEDVLPEGFLEAVGDRGRVLDHLVPQAHILNHPATGGFISHCGWNSVMESIDFGVPIIAMPMQWDQPINARLLVRLGVAVEIRRDEDGRIHPDDIARVIREVISGELGKKLRKKVARISARLRAEREEEMDEAAARLRELCLNRRALK

SEQ ID NO: 722 - protein, 440 aa, synthetic construct
QPPKVLMFPWLALGHVNPFLRIAKQLADRGFKIYLVSTAINLELIKKRIPEKYKDKIHLVELRLPELPELPPHYHTTNGLPPHLNKTLHKALKASAPRFREIVKEIKPDLVLYDFLIPWAEKVAAEHGIPAVPLLTSGAALFSYFFNFLKRPGEEFPFPAIRLSKREQDKMREMFGTEPPELDFLAPAAAGVMLMCTSRVIEGKYLDYCQKLTGVEVVPVGPPFQDPLTEDIYDPELIRWLDTKPEGSVVYVSFGSEYFLSREDMEAVARGLLASGANFIWVARFPKGEERRLEDVLPKGFLERVGDRGRVLDHLVPQAHILNHPATGGFISHCGWNSVMESIDFGVPIIAMPMQWDQPINARLLVRLGVAVEIRRDEDGRIHPDDIARVIREVISGELGEELREKVARISARLRARREEEMDAAAERLRALCRNRRAYK

SEQ ID NO: 723 - protein, 440 aa, synthetic construct
QPPKILMFPWLALGHVNPFLRIAKQLAKRGFKIYLVSTAINLELAKKRIPEEYKDRIHLVELRLPELPELPPHLHTTNGLPPHLNKTLHKALKASAPRFRKILKEIKPDLVLYDFLVPWAEKVAAEHGVPAVPLLTSGAALFSYFFNFLKRPGEEFPFPAIRLSKREQDKMREMFGTEPPELDFLAPAAAGIMLMCTSRVIEGKYLDYCQELTGVEVVPVGPPFQDPLTEDIYDPELIRWLDTKPEGSVVYVSFGSEYFLSREDMEAVARGLEESGAYFIWVARFPKGEERRLEDVLPEGFLEAVGDRGRVLDHLVPQAHILNHPATGGFISHCGWNSVMESIDFGVPIIAMPMQWDQPINARLLVRLGVAVEIRRDEDGRIHPEDIARVLKEVIYGELGEELRKKVREISARLRARREEEMDAAAARLRALCRNRRALK

SEQ ID NO: 724 - protein, 440 aa, synthetic construct
QPPKILMFPWLGLGHVNPFLRIAKQLADRGFKIYLVSTAINLELIKKRIPEEYKDRIHLVELRLPELPELPPHLHTTNGLPPHLNKTLHKALKASAPEFRKIVKEIKPDLVLYDFLVPWAEKVAAEHGIPAVPLLTSGAALFSYFFNFLKRPGEEFPFPAIRLSKREQDKMREMFGTEPPEEDFLAPAAAGVMLMCTSRVIEGKYLDYCQELTGVRVVPVGPPFQDPLTEDIYDPELIRWLDTKPERSVVYVSFGSEYFLSREDMEAVARGLEASGAYFIWVARFPKGEERPLEDVLPKGFLEAVGDRGRVLDHLVPQAHILNHPATGGFISHCGWNSVMESIDFGVPIIAMPMQWDQPINARLLVRLGVAVEIRRDEDGRVHPADIARVIKDVISGELGEKLREKVAEISARLRARREEEMDAAAARLRALCRNRRALK

SEQ ID NO: 725 - protein, 440 aa, synthetic construct
QPPKILMFPWLALGHVNPFLRIAKQLAKRGFKIYLVSTAINLELAKKRIPEEYKDKIHLVELRLPELPELPPHYHTTNGLPPHLNKTLHKALKAAAPRFREQVKEIKPDLVLYDFLVPWAEKVAAEHGIPAVPLLTSGAALFSYFFNFLKRPGEEFPFPAIRLSKREQDKMREMFGTEPPEEDFLVPAAAGVMLMCTSRVIEGKYLDYCQKLTGVEVVPVGPPFQDPLTEDIYDPELIRWLDTKPERSVVYVSFGSEYFLSREDMEAVARGLLASGAYFIWVARFPKGEERRLEDVLPEGFLEAVGDRGRVLDHLVPQAHILNHPATGGFISHCGWNSVMESIDFGVPIIAMPMQWDQPINARLLVRLGVAVEIRRDEDGRVHPEDIARVIREVISGELGKKLREKVARISARLRARREAEMDAAAERLRELCRNRRALK

SEQ ID NO: 726 - protein, 440 aa, synthetic construct
QPPKILMFPWLALGHVNPFLRIAKQLADRGFKIYLVSTAINLEMAKKRIPEKYKDRIHLVEYRLPELPELPPHYHTTNGLPPHLNKTLHKALKASAPRFREQVKEIKPDLVLYDFLIPWAEKVAAEHGIPAVPLLTSGAALFSYFFNFLKRPGEEFPFPAIRLSKREQDKMREMFGTEPPELDFLAPAAAGIMLMCTSRVIEGKYLDYCQELTGVEVVPVGAPFQDPLTEDIYDPELIRWLDTKPEGSVVYVSFGSEYFLSREDMEAVARGLLASGAYFIWVARFPKGEERPLEDVLPEGFLEAIGDRGRVLDHLVPQAHILNHPATGGFISHCGWNSVMESIDFGVPIIAMPMQWDQPINARLLVRLGVAVEIRRDEDGRIHPEDIARVLREVISGELGEELRKKVRRISLRLRARREEEMDAAAARLRALCRNRRAYK

SEQ ID NO: 727 - protein, 440 aa, synthetic construct
QPPKILMFPWLALGHVNPFLRIAKQLADRGFKIYLVSTAINLELIKKRIPEKYKDRIHLVEYRLPELPELPPHLHTTNGLPPHLNKTLHKALKASAPRFREIVKEIKPDLVLYDFLVPWAEKVAAEHGVPAVPLLTSGAALFSYFFNFLKRPGEEFPFPAIRLSKREQDKMREMFGTEPPEEDFLVPAAAGIMLMCTSRVIEGKYLDYCQELTGVRVVPVGPPFQDPLTEDIYDPELIRWLDTKPEGSVVYVSFGSEYFLSREDMEAVARGLEASGAYFIWVARFPKGEERPLEDVLPKGFLERVGDRGRVLDHLVPQAHILNHPATGGFISHCGWNSVMESIDFGVPIIAMPMQWDQPINARLLVRLGVAVEIRRDEDGRIHPEDIARVIREVIYGPLGEELRKKVARISARLRARREEEMDAAAARLRELCRNRRAYK

SEQ ID NO: 728 - protein, 440 aa, synthetic construct
QPPKVLMFPWLALGHVNPFLRIAKQLADRGFKIYLVSTAINLEMAKKRIPEKYKDRIHLVELRLPELPELPPHYHTTNGLPPHLNKTLHKALKAAAPRFREIVKEIKPDLVLYDFLVPWAEKVAAELGIPAVPLLTSGAALFSYFFNFLKRPGEEFPFPAIRLSKREQDKMREMFGTEPPELDFLAPAQAGIMLMCTSRVIEGKYLDYCTKLTGVEVVPVGPPFQDPLTEDIYDPELIRWLDTKPEGSVVYVSFGSEYFLSREDMEAVARGLEASGAYFIWVARFPKGEERRLEDVLPEGFLEAVGDRGRVLDHLVPQAHILNHPATGGFISHCGWNSVMESIDFGVPIIAMPMQWDQPINARLLVRLGVAVEIRRDEDGRIHPEDIARVIREVISGPLGEELRKKVRRISARLRAEREEEMDEAAARLRELCRNRRAYK

SEQ ID NO: 729 - protein, 440 aa, synthetic construct
QPPKVLMFPWLALGHVNPFLRIAKQLADRGFKIYLVSTAINLEMAKKRIPEKYKDRIHLVELRLPELPELPPHYHTTNGLPPHLNKTLHKALKMAAPRFREQVKEIKPDLVLYDFLIPWAEKVAAKHGIPAVPLLTSGAALFSYFFNFLKRPGEEFPFPAIRLSKREQDKMREMFGTEPPEEDFLVPAAAGVMLMCTSRVIEGKYLAYCQKLTGVRVVPVGAPFQDPLTEDIYDPELIRWLDTKPEGSVVYVSFGSEYFLSREDMEAVARGLLESGAYFIWVARFPKGEERPLEDVLPEGFLEAVGDRGRVLDHLVPQAHILNHPATGGFISHCGWNSVMESIDFGVPIIAMPMQWDQPINARLLVDLGVAVEIRRDEDGRVHPEDIARVIREVISGELGEKLREKVARIAARLRARREEEMDEAAARLRELCRNRRALK

SEQ ID NO: 730 - protein, 440 aa, synthetic construct
QPPKVLMFPWLALGHVNPFLRIAKQLADRGFKIYLVSTKINLEMAKKRIPEKYKDRIHLVELRLPELPELPPHYHTTNGLPPHLNKTLHKALKASAPEFRKQVKEIKPDLVLYDFLIPWAEKVAAELGIPAVPLLTSGAALFSYFFNFLKRPGEEFPFPAIRLSKREQDKMREMFGTEPPELDFLAPAAAGIMLMCTSRVIEGKYLDYCQKLTGVRVVPVGAPFQDPLTEDIYDPELIRWLDTKPEGSVVYVSFGSEYFLSREDMEAVARGLEASGANFIWVARFPKGEERRLEDVLPEGFLERVGDRGRVLDHLVPQAHILNHPATGGFISHCGWNSVMESIDFGVPIIAMPMQWDQPINARLLVRLGVAVEIRRDEDGRIHPEDIARVLREVISGELGEKLRKKVARISARLRARREEEMDAAAARLRALCLNRRALK

SEQ ID NO: 731 - protein, 440 aa, synthetic construct
QTPKVLMFPWLGLGHVNPFLRIAKQLADRGFHIYLVSTAINLELAKKRIPEEYKDKIHLVELRLPELPELPPHYHTTNGLPPHLNKTLHKALKEAAPRLREQVKEIKPDLVLYDFLIPWAEKIAEEKGVPAVPLLTSGAALFSYFFNFLKRPGEEFPFPAIRLSKREQDKMREMFGTEPPELDFLAPAAAGIMLMCTSRVIEGKYLDYCEELTGVRVVPVGPPFQDPLTEDIYDPELIRWLDTKPERSVVYVSFGSEYFLSREDMEAVARGLEASGAYFIWVARFPKGEERPLEEVLPPGFLEAVGDKGRVLDHLVPQAHILNHPATGGFISHCGWNSVMESIDFGVPIIAMPMQWDQPINARLLVRLGVAVEIRRDEDGRIHPEEIARVIRAVISGEKGEKLREKVRRISARLRARREEEMDAAAARLRELCRNRRAYK

SEQ ID NO: 732 - protein, 440 aa, synthetic construct
QPPKILMFPWLALGHVNPFLRIAKQLADRGFKIYLVSTAINLEMAKKRIPEKYKDRIHLVELRLPELPELPPHLHTTNGLPPHLNKTLHKALKESAPRLREQVKEIKPDLVLYDFLIPWAEKVAEEKGIPAVPLLTSGAALFSYFFNFLKRPGEEFPFPAIRLSKREQDKMREMFGTEPPELDFLAPAAAGIMLMCTSRVIEGKYLDYCEELTGVEVVPVGPPFQDPLTEDIYDPELIRWLDTKPEGSVVYVSFGSEYFLSREDMEAVARGLEESGAYFIWVARFPKGEERRLEEVLPPGFLEAVGDKGRVLDHLVPQAHILNHPATGGFISHCGWNSVMESIDFGVPIIAMPMQWDQPINARLLVRLGVAVEIRRDEDGRVHPEEIARVLKEVISGEKGEELRKKVARISARLRARREEEMDEAAERLRALCRNRRAYK

SEQ ID NO: 733 - protein, 440 aa, synthetic construct
QPPKVLMFPWLALGHVNPFLRIAKQLADRGFEIYLVSTAINLELIKKRIPEKYKDRIHLVELRLPELPELPPHLHTTNGLPPHLNGTLHKALKEAAPRLREQVKELKPDLVLYDFLIPWAEKVAEEKGVPAVPLLTSGAALFSYFFNFLKRPGEEFPFPAIRLSKREQDKMREMFGTEPPELDFLVPAAAGIMLMCTSRVIEGKYLDYCEELTGVRVVPVGAPFQDPLTEDIYDPELIRWLDTKPEHSVVYVSFGSEYFLSREDMEAVARGLEASGANFIWVARFPKGEERPLEEVLPEGFLERVGDKGRVLDHLVPQAHILNHPATGGFISHCGWNSVMESIDFGVPIIAMPMQWDQPINARLLVELGVAVEIRRDEDGRIHPDEIARVIKEVIYGEKGKKLRENVRRISARLRARREEEMDEAAARLRELCRNRRALK

SEQ ID NO: 734 - protein, 440 aa, synthetic construct
QPPKIAMFPWLALGHVNPFLRIAKQLAKRGFKIYLVSTKINLEMAKKRIPEEYKDRIHLVELRLPELPELPPHYHTTNGLPPHLNKTLHKALKEAAPRLREQVKEIKPDLVLYDFLIPWAEKVAAEKGIPGVPLLTSGAALFSYFFNFLKRPGEEFPFPAIRLSKREQDKMREMFGTEPPELDFLVPAAAGVMLMCTSRVIEGEYLAYCEELTGVRVVPVGPPFQDPLTEDIYDPELIRWLDTKPDRSVVYVSFGSEYFLSREDMEAVARGLLASGAYFIWVARFPKGEERRLEEVLPPGFLEAVGDKGRVLDHLVPQAHILNHPATGGFISHCGWNSVMESIDFGVPIIAMPMQWDQPINARLLVRLGVAVEIRRDEDGRIHPEDIARVLREVISGEKGEELRKKVARISARLRAEREEEMDEAAARLRELCRNRRALK

SEQ ID NO: 735 - protein, 440 aa, synthetic construct
QPPKVLMFPWLALGHVNPFLRIAKQLADRGFKIYLVSTAINLELAKKRIPEEYKDKIHLVELALPELPELPPHYHTTNGLPPHLNKTLHKALKESAPRFREQLKEIKPDLVLYDFLVPWAEKVAEEKGIPAVPLLTSGAALFSYFFNFLKRPGEEFPFPAIRLSKREQDKMREMFGTEPPEEDFLVPAAAGVMLMCTSRVIEGKYLAYCEELTGVRVVPVGPPFQDPLTEDIYDPELIRWLDTKPEGSVVYVSFGSEYFLSREDMEAVARGLEASGAYFIWVARFPKGEERPLEEVLPPGFLERVGDKGRVLDHLVPQAHILNHPATGGFISHCGWNSVMESIDFGVPIIAMPMQWDQPINARLLVRLGVAVEIRRDEDGRVHPEEIARVIREVISGEKGEELREKVRRISARLRARREEEMDAAAERLAALCRNRRALK

SEQ ID NO: 736 - protein, 440 aa, synthetic construct
QTPKILMFPWLALGHVNPFLRIAKQLAKRGFKIYLVSTAINLEMAKKRIPEKYKDKIHLVELRLPELPELPPHYHTTNGLPPHLNKTLHKALKEAAPELRKIVKEIKPDLVLYDFLIPWAEKVAAKKGIPAVPLLTSGAALFSYFFNFLKRPGEEFPFPAIRLSKREQDKMREMFGTEPPEEDFLAPAAAGIMLMCTSRVIEGKYLDYCEELTGVEVVPVGPPFQDPLTEDIDDPELIRWLDTKPEGSVVYVSFGSEYFLSREDMEAVARGLLASGANFIWVARFPKGEERRLEEVLPPGFLERVGDKGRVLDHLVPQAHILNHKATGGFISHCGWNSVMESIDFGVPIIAMPMQWDQPINARLLVDLGVAVEIRRDEDGRVHPEEIARVIREVISGEKGEELRKKVRDISARLRARREEEMDEAAARLRELCRNRRAYK

SEQ ID NO: 737 - protein, 440 aa, synthetic construct
QPPKILMFPWLALGHVNPFLRIAKQLADRGFHIYLVSTKINLELAKKRIPEKYKDRIHLVELRLPELPELPEHYHTTNGLPPHLNKTLHKALKEAAPRLREQVKEIKPDLVLYDFLIPWAEKIAEEKGVPAVPLLTSGAALFSYFFNFLKRPGEEFPFPAIRLSKREQDKMREMFGTEPPEEDFLVPAASGIMLMCTSRVIEGEYLAYCEELTGVRVVPVGAPFQDPLTEDIYDPELIRWLDTKPERSVVYVSFGSEYFLSREDMEAVARGLLASGAYFIWVARFPKGEERRLEEVLPPGFLEAVGDKGRVLDHLVPQAHILNHPATGGFISHCGWNSVMESIDFGVPIIAMPMQWDQPINARLLVRLGVAVEIPRDEDGRVHPEEIARVIREVISGEKGKELREKVREISARLRAAREEEMDAAAARLAELCLNRRALK

SEQ ID NO: 738 - protein, 440 aa, synthetic construct
QPPKVLMFPWLALGHVNPFLRIAKQLADRGFKIYLVSTAINLEMAKKRIPEKYKDRIHLVELALPELPELPEHLHTTNGLPPHLNKTLHKALKESAPRLREIVKEIKPDLVLYDFLIPWAEKVAAEKGIPAVPLLTSGAALFSYFFNFLKRPGEEFPFPAIRLSKREQDKMREMFGTEPPELDFLAPAAAGIMLMCTSRVIEGKYLDYCEKLTGVRVVPVGPPFQDPLTEDIYDPELIRWLDTKPEGSVVYVSFGSEYFLSREDMHAVARGLLASGAYFIWVARFPKGEERPLEEVLPPGFLERVGDRGRVLDHLVPQAHILNHPATGGFISHCGWNSVMESIDFGVPIIAMPMQWDQPINARLLVRLGVAVEIRRDEDGRIHPEEIARVIREVIYGEKGEELREKVREISARLRAAREEEMDAAAARLAALCRNRRALK

SEQ ID NO: 739 - protein, 440 aa, synthetic construct
QPPKILMFPWLALGHVNPFLRIAKQLAKRGFHIYLVSTKINLELAKKRIPEEYKDKIHLVELRLPELPELPPHLHTTNGLPPHLNKTLHKALKESAPRFREQVKEIKPDLVLYDFLIPWAEKVAEEKGIPAVPLLTSGAALFSYFFNFLKRPGEEFPFPAIRLSKREQDKMREMFGTEPPELDFLAPAAAGIMLMCTSRVIEGKYLAYCEELTGVEVVPVGPPFQDPLTEDIYDPELIRWLDTKPEGSVVYVSFGSEYFLSREDMEAVARGLEASGANFIWVARFPKGEERPLEEVLPPGFLEAVGDRGRVLDHLVPQAHILNHPATGGFISHCGWNSVMESIDFGVPIIAMPMQWDQPINARLLVRLGVAVEIRRDEDGRIHPEEIARVIREVIYGEKGKKLRAKVRRISARLRAAREREMDEAAARLRELCLNRRALK

SEQ ID NO: 740 - protein, 440 aa, synthetic construct
QTPKVLMFPWLALGHVNPFLRIAKQLADRGFKIYLVSTAINLELAKKRIPEKYKDRIHLVELALPELPELPPHLHTTNGLPPHLNKTLHKALKESAPRLREQLKEIKPDLVLYDFLIPWAEKVAEEKGIPAVPLLTSGAALFSYFFNFLKRPGEEFPFPAIRLSKREQDKMREMFGTEPPELDFLAPAAAGIMLMCTSRVIEGKYLDYCEKLTGVRVVPVGPPFQDPLTEDIYDPELIRWLDTKPEGSVVYVSFGSEYFLSREDMEAVARGLLASGANFIWVARFPKGEERRLEEVLPPGFLEAVGDRGRVLDHLVPQAHILNHPATGGFISHCGWNSVMESIDFGVPIIAMPMQWDQPINARLLVDLGVAVEIRRDEDGRIHAEDIARVLKEVIYGELGKKLREKVKRISARLRAAREEEMDEAAARLRELCRNRRALK

SEQ ID NO: 741 - protein, 440 aa, synthetic construct
QPPKILMFPWLGLGHVNPFLRIAKQLADRGFKIYLVSTKINLELAKKRIPEEYKDKIHLVELALPELPELPPHYHTTNGLPPHLNKTLHKALKESAPRLREQVKEIKPDLVLYDFLIPWAEKIAEEKGIPAVPLLTSGAALFSYFFNFLKRPGEEFPFPAIRLSKREQDKMREMFGTEPPEEDFLVPAAAGVMLMCTSRVIEGEYLAYCEKLTGVRVVPVGPPFQDPLTEDIYDPELIRWLDTKPEGSVVYVSFGSEYFLSREQMEAVARGLLASGAYFIWVARFPKGEERRLEEVLPPGFLEAVGDKGRVLDHLVPQAHILNHKATGGFISHCGWNSVMESIDFGVPIIAMPMQWDQPINARLLVDLGVAVEIRRDEDGRIHPEEIARVIREVISGEKGKKLREKVAEISARLRAAREREMDEAAARLRELCRNRRAYK

SEQ ID NO: 742 - protein, 440 aa, synthetic construct
QPPKVLMFPWLALGHVNPFLRIAKQLADRGFKIYLVSTAINLEMAKKRIPEKYKDKIHLVELRLPELPELPPHYHTTNGLPPHLNKTLHKALKESAPRLREIVKEIKPDLVLYDFLIPWAEKVAAEKGIPAVPLLTSGAALFSYFFNFLKRPGEEFPFPAIRLSKREQDKMREMFGTEPPELDFLVPAAAGVMLMCTSRVIEGEYLDYCEKLTGVRVVPVGAPFQDPLTEDIYDPELMRWLDTKPEGSVVYVSFGSEYFLSREDMEAVARGLEASGANFIWVARFPKGEERRLEEVLPPGFLERVGDKGRVLDHLVPQAHILNHKATGGFISHCGWNSVMESIDFGVPIIAMPMQWDQPINARLLVRLGVAVEIRRDEDGRIHPDEIARVIREVISGEKGKKLREKVRRISARLRAEREEEMDEAAERLAALCRNRRALK

SEQ ID NO: 743 - protein, 440 aa, synthetic construct
QPPKILMFPWLALGHVNPFLRIAKQLADRGFKIYLVSTAINLELAKKRIPEKYKDRIHLVELRLPELPELPPHLHTTNGLPPHLNKTLHKALKEAAPRLREIVKEIKPDLVLYDFLIPWAEKIAEEKGIPAVPLLTSGAALFSYFFNFLKRPGEEFPFPAIRLSKREQDKMREMFGTEPPELDFLVPAKAGVMLMCTSRVIEGEYLAYCEKLTGVRVVPVGPPFQDPLTEDIDDPELIRWLDTKPEHSVVYVSFGSEYFLSREDMEAVARGLEESGAYFIWVARFPKGEERPLEEVLPPGFLERVGDKGRVLDHLVPQAHILNHPATGGFISHCGWNSVMESIDFGVPIIAMPMQWDQPINARLLVRLGVAVEIRRDEDGRIHPEEIARVIKEVISGEKGEELREKVRRISARLRARREEEMDAAAARLRELCRNRRALK

SEQ ID NO: 744 - protein, 440 aa, synthetic construct
QPPKVLMFPWLALGHVNPFLRIAKQLADRGFEIYLVSTAINLELAKKRIPEKYKDKIHLVELALPELPELPEHLHTTNGLPPHLNKTLHKALKEAAPRFREQVKEIKPDLVLYDFLIPWAEKVAEEKGVPGVPLLTSGAALFSYFFNFLKRPGEEFPFPAIRLSKREQDKMREMFGTEPPELDFLAPAAAGIMLMCTSRVIEGKYLDYCEKLTGVRVVPVGPPFQDPLTEDIYDPELIRWLDTKPENSVVYVSFGSEYFLSREQMEAVARGLLASGANFIWVARFPKGEERPLEEVLPPGFLEAVGDRGRVLDHLVPQAHILNHKATGGFISHCGWNSVMESIDFGVPIIAMPMQWDQPINARLLVRLGVAVEIRRDEDGRVHPADIARVIREVIFGEKGKELREKVARISARLRARREEEMDEAAARLRELCRNRRALK

SEQ ID NO: 745 - protein, 440 aa, synthetic construct
QPPKILMFPWLGLGHVNPFLRIAKQLAKRGFKIYLVSTAINLELAKKRIPEEYKDRIHLVELRLPELPELPEHLHTTNGLPPHLNKTLHKALKESAPRFREQVKEIKPDLVLYDFLVPWAEKIAAEKGVPAVPLLTSGAALFSYFFNFLKRPGEEFPFPAIRLSKREQDKMREMFGTEPPEEDFLVPAAAGVMLMCTSRVIEGKYLAYCEKLTGVRVVPVGPPFQDPLTEDIYDPELIRWLDTKPEGSVVYVSFGSEYFLSREDMEAVARGLEASGANFIWVARFPKGEERPLEEVLPPGFLEAIGDKGRVLDHLVPQAHILNHPATGGFISHCGWNSVMESIDFGVPIIAMPMQWDQPINARLLVRLGVAVEIRRDEDGRVHPEEIARVIKEVISGEKGEELRKKVREIAARLRAAREAEMDEAAARLRELCLNRRALK

SEQ ID NO: 746 - protein, 440 aa, synthetic construct
QPPKILMFPWLALGHVNPFLRIAKQLADRGFHIYLVSTAINLEMAKKRIPEKYKDRIHLVELRLPELPELPPHYHTTNGLPPHLNKTLHKALKESAPRFREQVKEIKPDLVLYDFLIPWAEKVAEEKGVPGVPLLTSGAALFSYFFNFLKRPGEEFPFPAIRLSKREQDKMREMFGTEPPEEDFLVPAAAGVMLMCTSRVIEGEYLAYCEELTGVEVVPVGAPFQDPLTEDIYDPELIRWLDTKPEGSVVYVSFGSEYFLSREDMEAVARGLLASGANFIWVARFPKGEERRLEEVLPPGFLEAVGDKGRVLDHLVPQAHILNHPATGGFISHCGWNSVMESIDFGVPIIAMPMQWDQPINARLLVDLGVAVEIRRDEDGRIHAEEIARVIKEVIYGEKGEELREKVRRISARLRARREEEMDAAAARLRELCRNRRAYK

SEQ ID NO: 747 - protein, 440 aa, synthetic construct
QPPKILMFPWLALGHVNPFLRIAKQLAKRGFHIYLVSTAINLELAKKRIPEKYKDRIHLVELRLPELPELPPHLHTTNGLPPHLNKTLHKALKESAPRLREQVKEIKPDLVLYDFLVPWAEKVAEEKGVPAVPLLTSGAALFSYFFNFLKRPGEEFPFPAIRLSKREQDKMREMFGTEPPELDFLVPAAAGVMLMCTSRVIEGEYLDYCEELTGVRVVPVGPPFQDPLTEDIYDPELIRWLDTKPEGSVVYVSFGSEYFLSREDMEAVARGLEESGANFIWVARFPKGEERRLEEVLPPGFLEAIGDKGRVLDHLVPQAHILNHPATGGFISHCGWNSVMESIDFGVPIIAMPMQWDQPINARLLVELGVAVEIRRDEDGRIHPEEIARVIREVISGEKGEKLRAKVRRISARLRAAREEEMDAAAARLAALCRNRRALK

SEQ ID NO: 748 - protein, 440 aa, synthetic construct
QPPKVLMFPWLALGHVNPFLRIAKQLAKRGFHIYLVSTAINLELAKKRIPEKYKDRIHLVEYRLPELPELPPHYHTTNGLPPHLNKTLHKALKESAPRFREQVKEIKPDLVLYDFLIPWAEKVAEEKGIPAVPLLTSGAALFSYFFNFLKRPGEEFPFPAIRLSKREQDKMREMFGTEPPELDFLVPAAAGIMLMCTSRVIEGKYLDYCEKLTGVRVVPVGAPFQDPLTEDIYDPELIRWLDTKPERSVVYVSFGSEYFLSREQMEEVARGLEASGAYFIWVARFPKGEERPLEEVLPPGFLEAVGDRGRVLDHLVPQAHILNHKATGGFISHCGWNSVMESIDFGVPIIAMPMQWDQPINARLLVDLGVAVEIRRDEDGRIHAEEIARVLKEVISGEKGKKLREKVRRISARLRAAREEEMDAAAARLAELCRNRRALK

SEQ ID NO: 749 - protein, 440 aa, synthetic construct
QPPKVLMFPWLALGHVNPFLRIAKQLADRGFHIYLVSTAINLEMAKKRIPEEYKDKIHLVELRLPELPELPPHYHTTNGLPPHLNKTLHKALKEAAPRLREQVKEIKPDLVLYDFLIPWAEKVAAEKGVPGVPLLTSGAALFSYFFNFLKRPGEEFPFPAIRLSKREQDKMREMFGTEPPELDFLVPAAAGVMLMCTSRVIEGKYLAYCEKLTGVRVVPVGPPFQDPLTEDIYDPELIRWLDTKPEHSVVYVSFGSEYFLSREDMEAVARGLEASGAYFIWVARFPKGEERPLEEVLPPGFLEAVGDKGRVLDHLVPQAHILNHKATGGFISHCGWNSVMESIDFGVPIIAMPMQWDQPINARLLVRLGVAVEIRRDEDGRIHPEDIARVIRDVISGEKGKELREKVKRISAKLRAAREREMDAAAARLAELCLNRRALK

SEQ ID NO: 750 - protein, 440 aa, synthetic construct
QPPKVLMFPWLALGHVNPFLRIAKQLADRGFHIYLVSTKINLEMAKKRIPEKYKDKIHLVELRLPELPELPPHLHTTNGLPPHLNKTLHKALKEAAPRLREQVKEIKPDLVLYDFLVPWAEKVAAEKGIPAVPLLTSGAALFSYFFNFLKRPGEEFPFPAIRLSKREQDKMREMFGTEPPEEDFLAPAAAGIMLMCTSRVIEGKYLDYCEELTGVRVVPVGAPFQDPLTEDIYDPELIRWLDTKPEHSVVYVSFGSEYFLSREQMEAVARGLLASGANFIWVARFPKGEERRLEEVLPPGFLEAVGDKGRVLDHLVPQAHILNHPATGGFISHCGWNSVMESIDFGVPIIAMPMQWDQPINARLLVRLGVAVEIRRDEDGRIHAEEIARVIREVISGEKGKELREKVARISARLRARREEEMDAAAERLRELCRNRRALK

SEQ ID NO: 751 - protein, 440 aa, synthetic construct
QPPKVLMFPWLALGHVNPFLRIAKQLAKRGFHIYLVSTAINLELAKKRIPEEYKDKIHLVELRLPELPELPPHLHTTNGLPPHLNKTLHKALKESAPRLREILKEIKPDLVLYDFLIPWAEKVAEKKGIPAVPLLTSGAALFSYFFNFLKRPGEEFPFPAIRLSKREQDKMREMFGTEPPEEDFLAPAAAGIMLMCTSRVIEGKYLAYCEKLTGVEVVPVGPPFQDPLTEDIYDPELIRWLDTKPERSVVYVSFGSEYFLSREDMEAVARGLLESGAYFIWVARFPKGEERPLEEVLPPGFLEAVGDKGRVLDHLVPQAHILNHPATGGFISHCGWNSVMESIDFGVPIIAMPMQWDQPINARLLVRLGVAVEIRRDEDGRVHPDEIARVLREVISGEKGKELRKKVRRISARLRARREEEMDAAAARLRELCRNRRALK

SEQ ID NO: 752 - protein, 440 aa, synthetic construct
QPPKVLMFPWLGLGHVNPFLRIAKQLADRGFHIYLVSTAINLELAKKRIPEKYKDRIHLVEYRLPELPELPPHYHTTNGLPPHLNKTLHKALKESAPRLREQVKEIKPDLVLYDFLIPWAEKVAAEKGVPAVPLLTSGAALFSYFFNFLKRPGEEFPFPAIRLSKREQDKMREMFGTEPPELDFLAPAAAGIMLMCTSRVIEGKYLDYCEKLTGVRVVPVGAPFQDPLTEDIYDPELMRWLDTKPENSVVYVSFGSEYFLSREDMEAVARGLLESGANFIWVARFPKGEERRLEEVLPPGFLEAVGDRGRVLDHLVPQAHILNHPATGGFISHCGWNSVMESIDFGVPIIAMPMQWDQPINARLLVRLGVAVEIRRDEDGRIHPEEIARVLKEVISGEKGEKLRKKVRRISARLRARREEEMDEAAARLRELCLNRRALK

SEQ ID NO: 753 - protein, 440 aa, synthetic construct
QPPKILMFPWLALGHVNPFLRIAKQLADRGFKIYLVSTAINLELAKKRIPEKYKDRIHLVELRLPELPELPEHYHTTNGLPPHLNKTLHKALKEAAPRLREQVKEIKPDLVLYDFLVPWAEKIAAEKGVPAVPLLTSGAALFSYFFNFLKRPGEEFPFPAIRLSKREQDKMREMFGTEPPELDFLVPAAAGIMLMCTSRVIEGEYLAYCEKLTGVRVVPVGAPFQDPLTEDIYDPELMRWLDTKPEGSVVYVSFGSEYFLSREDMKAVARGLEASGANFIWVARFPKGEERPLEEVLPPGFLEAVGDRGRVLDHLVPQAHILNHPATGGFISHCGWNSVMESIDFGVPIIAMPMQWDQPINARLLVRLGVAVEIRRDEDGRVHPEEIARVIRAVISGEKGEELREKVARIAARLRAAREEEMDEAAERLAELCRNRRALK

SEQ ID NO: 754 - protein, 440 aa, synthetic construct
QPPKILMFPWLALGHVNPFLRIAKQLADRGFHIYLVSTAINLEMAKKRIPEKYKDKIHLVELRLPELPELPPHYHTTNGLPPHLNKTLHKALKEAAPRLREIVKEIKPDLVLYDFLIPWAEKVAEKKGVPAVPLLTSGAALFSYFFNFLKRPGEEFPFPAIRLSKREQDKMREMFGTEPPELDFLAPAAAGIMLMCTSRVIEGKYLDYCEKLTGVRVVPVGPPFQDPLTEDIYDPELIAWLDTKPEGSVVYVSFGSEYFLSREDMEAVARGLLESGANFIWVARFPKGEERRLEEVLPPGFLEAVGDRGRVLDHLVPQAHILNHPATGGFISHCGWNSVMESIDFGVPIIAMPMQWDQPINARLLVDLGVAVEIRRDEDGRIHPEEIARVIRDVIYGEKGKELREKVRRISARLRAAREEEMDEAAERLRELCRNRRALK

SEQ ID NO: 755 - protein, 440 aa, synthetic construct
QRPRILMFPWLALGHVNPFLRIAKQLADRGFKIYLVSTAINLELAKKRIPEKYKDKIHLVELRLPELPELPPHYHTTNGLPPHLNKTLHKALKESAPRLREQVKEIKPDLVLYDFLVPWAEKVAEEKGVPAVPLLTSGAALFSYFFNFLKRPGEEFPFPAIRLSKREQDKMREMFGTEPPEEDFLAPAAAGIMLMCTSRVIEGKYLEYCEKLTGVRVVPVGPPFQDPLTEDIYDPELIRWLDTKPEGSVVYVSFGSEYFLSREDMEAVARGLLASGAYFIWVARFPKGEEVPLEEVLPPGFLEAAGDKGRVLDHLVPQAHILNHPATGGFISHCGWNSVMESIDFGVPIIAMPMQWDQPINARLLVRLGVAVEIRRDEDGRIHPEEIARVIREVISGEKGERLRARVRRISAELRARREEEMDEAAERLAELCRNRRAYK

SEQ ID NO: 756 - protein, 440 aa, synthetic construct
QRPKILMFPWLALGHVNPFLRIAKQLADRGFKIYLVSTKINLEMAKKRIPEEYKDKIHLVELRLPELPELPPHYHTTNGLPPHLNKTLHKALKESAPEFRKQLKEIKPDLVLYDFLVPWAEKIAEEKGVPAVPLLTSGAALFSYFFNFLKRPGEEFPFPAIRLSKREQDKMREMFGTEPPEEDFLVPAAAGIMLMCTSRVIEGKYLDYCEELTGVRVVPVGAPFQDPLTEDIYDPELIAWLDTKPERSVVYVSFGSEYFLSREDMEAVARGLEASGAYFIWVARFPKGEERRLEDVLPPGFLERAGDRGRVLDHLVPQAHILNHPATGGFISHCGWNSVMESIDFGVPIIAMPMQWDQPINARLLVRLGVAVEIRRDEDGRIHPEEIARVIKEVISGEKGERLRKRVARISARLRARREREMDAAAERLRALCRNRNAYK

SEQ ID NO: 757 - protein, 440 aa, synthetic construct
QRPKILMFPWLGLGHVNPFLRIAKQLADRGFKIYLVSTKINLELAKKRIPEEYKDKIHLVELRLPELPELPEHYHTTNGLPPHLNKTLHKALKEAAPRLKEQVKEIKPDLVLYDFLVPWAEKVAEEKGVPAVPLLTSGAALFSYFFNFLKRPGEEFPFPEIRLSKREQDKMREMFGTEPPEEDFLVPAAAGVMLMCTSRVIEGEYLEYCEKLTGVRVVPVGAPFQDPLTEDIYDPELIRWLDTKPDRSVVYVSFGSEYFLSREQMEAVARGLEESGAYFIWVARFPKGEERRLEEVLPPGFLEAAGDKGRVLDHLVPQAHILNHPATGGFISHCGWNSVMESIDFGVPIIAMPMQWDQPINARLLVRLGVAVEIRRDEDGRVHPEEIARVIREVIYGEKGEELRARVRRIAARLRAAREEEMDEAAEVLAALCLNRRAYK

SEQ ID NO: 758 - protein, 440 aa, synthetic construct
QRPRVLMFPWLGLGHVNPFLRIAKQLADRGFKIYLVSTAINLEMAKKRIPEKYKDRIHLVEYRLPELPELPPHYHTTNGLPPHLNKTLHKALKESAPRFREQVKEIKPDLVLYDFLVPWAEKVAAEKGIPAVPLLTSGAALFSYFFNFLKRPGEEFPFPEIRLSKREQDKMREMFGTEPPEEDFLVPAAAGVMLMCTSRVIEGKYLAYCEKLTGVRVVPVGPPFQDPLTEDIDDPELIRWLDTKPERSVVYVSFGSEYFLSREDMEAVARGLEASGANFIWVARFPKGEERPLEEVLPPGFLEAAGDKGRVLDHLVPQAHILNHPATGGFISHCGWNSVMESIDFGVPIIAMPMQWDQPINARLLVRLGVAVEIRRDEDGRIHPEEIARVLREVIYGEKGERLRARVRRISARLRAEREEEMDAAAARLRALCRNRRAYK

SEQ ID NO: 759 - protein, 440 aa, synthetic construct
QRPKVLMFPWLGLGHVNPFLRIAKQLAKRGFKIYLVSTAINLELAKKRIPEKYKDKIHLVELRLPELPELPEHYHTTNGLPPHLNKTLHKALKESAPRLREQVKEIKPDLVLYDFLVPWAEKVAAEKGVPAVPLLTSGAALFSYFFNFLKRPGEEFPFPEIRLSKREQDKMREMFGTEPPELDFLAPAAAGIMLMCTSRVIEGKYLAYCEELTGVEVVPVGPPFQDPLTEDIYDPELIRWLDTKPEGSVVYVSFGSEYFLSREQMEAVARGLEASGAYFIWVARFPKGEERPLEEVLPPGFLEAAGDRGRVLDHLVPQAHILNHPATGGFISHCGWNSVMESIDFGVPIIAMPMQWDQPINARLLVRLGVAVEIRRDEDGRVHPEEIARVIREVIHGEKGERLRARVRRIAARLRARREEEMARAAARLRELCRNRRALK

SEQ ID NO: 760 - protein, 440 aa, synthetic construct
QPPKVLMFPWLALGHVNPFLRIAKQLADRGFEIYLVSTAINLELAKKRIPEKYKDKIHLVELALPELPELPPHLHTTNGLPPHLNKTLHKALKESAPRFKEQVKEIKPDLVLYDFLIPWAEKVAEEKGVPGVPLLTSGAALFSYFFNFLKRPGEEFPFPAIRLSKREQDKMREMFGTEPPELDFLVPAAAGVMLMCTSRVIEGKYLDYCEKLTGVKVVPVGPPFQDPLTEDIYDPELIRWLDTKPPGSVVYVSFGSEYFLSREDMEAVARGLLASGVNFIWVARFPKGEERRLEEVLPEGFLEAAGDKGRVLDHLVPQAHILNHPATGGFISHCGWNSVMESIDFGVPIIAMPMQWDQPINARLLVRLGVAVEIPRDEDGRIHADDIARVIKDVIYGEKGKRLRARVRRISARLRARREEEMDAAAARLAELCRNRRALK

SEQ ID NO: 761 - protein, 440 aa, synthetic construct
QPLKVAMFPWLALGHVNPFLRIAKQLADRGFKIYLVSTKINLEMAKKRIPEEYKDRIHLVELRLPELPELPEHYHTTNGLPPHLNKTLHKALKEAAPRLREQVKEIKPDLVLYDFLVPWAEKVAEEKGVPAVPLLTSGAALFSYFFNFLKRPGEEFPFPEIRLSKREQDKMREMFGTEPPELDFLVPAAAGVMLMCTSRVIEGEYLDYCEKLTGVRVVPVGAPFQDPLTEDIYDPELIRWLDTKPDGSVVYVSFGSEYFLSREDMHAVARGLEESGAYFIWVARFPKGEEVRLEEVLPPGFLEAAGDKGRVLDHLVPQAHILNHPATGGFISHCGWNSVMESIDFGVPIIAMPMQWDQPINARLLVRLGVAVEIRRDEDGRVHPEEIARVIKEVISGETGERLWARVRRISAKLRAAREEEMDRAAARLRALCLNRRALK

SEQ ID NO: 762 - protein, 440 aa, synthetic construct
QRMRILMFPWLALGHVNPFLRIAKQLADRGFKIYLVSTAINLEMAKKRIPEEYKDKIHLVELALPELPELPPHYHTTNGLPPHLNKTLHKALKEAAPRLREILKEIKPDLVLYDFLIPWAEKVAEEKGIPAVPLLTSGAALFSYFFNFLKRPGEEFPFPAIRLSKREQDKMREMFGTEPPEEDFLVPAAAGVMLMCTSRVIEGKYLDYCEKLTGVRVVPVGPPFQDPLTEDIYDPELMRWLDTKPERSVVYVSFGSEYFLSREDMEAVARGLEESGANFIWVARFPKGEERRLEEVLPPGFLEAAGDKGRVLDHLVPQAHILNHPATGGFISHCGWNSVMESIDFGVPIIAMPMQWDQPINARLLVRLGVAVEIRRDEDGRIHPEEIARVIKDVISGEKGERLRARVRRISARLRAAREEEMDAAAARLAALCRNRRAYK

SEQ ID NO: 763 - protein, 440 aa, synthetic construct
QRPRVLMFPWLALGHVNPFLRIAKQLADRGFHIYLVSTAINLELIKKRIPEEYKDKIHLVELALPELPELPPHLHTTNGLPPHLNKTLHKALKEAAPRLREQVKEIKPDLVLYDFLVPWAEKVAEEKGIPAVPLLTSGAALFSYFFNFLKRPGEEFPFPEIRLSKREQDKMREMFGTEPPELDFLAPAAAGVMLMCTSRVIEGKYLEYCEELTGVRVVPVGPPFQDPLTEDIYDPELIRWLDTKPEGSVVYVSFGSEYFLSREDMEAVARGLEASGAYFIWVARFPKGEEVRLEEVLPPGFLEAAGDRGRVLDHLVPQAHILNHKATGGFISHCGWNSVMESIDFGVPIIAMPMQWDQPINARLLVRLGVAVEIRRDEDGRIHPEEIARVIKEVISGEKGKRLRARVRRISARLRARREEEMDRAAARLAALCLNRRALK

SEQ ID NO: 764 - protein, 440 aa, synthetic construct
QRLRILMFPWLGLGHVNPFLRIAKQLADRGFHIYLVSTAINLEMAKKRIPEKYKDKIHLVELRLPELPELPPHYHTTNGLPPHLNKTLHKALKEAAPRLREQVKEIKPDLVLYDFLIPWAEKVAEKKGIPAVPLLTSGAALFSYFFNFLKRPGEEFPFPAIRLSKREQDKMREMFGTEPPEEDFLAPAAAGIMLMCTSRVIEGEYLDYCTKLTGVKVVPVGPPFQDPLTEDIYDPELMRWLDTQPERSVVYVSFGSEYFLSREDMEAVARGLEASGAYFIWVARFPKGEERRLEEVLPPGFLEAAGDKGRVLDHLVPQAHILNHPATGGFISHCGWNSVMESIDFGVPIIAMPMQWDQPINARLLVRLGVAVEIPRDEDGRVHPEEIARVIREVISGEKGKRLWARVRRISARLRARREEEMDAAAARLRELCRNRNAYK

SEQ ID NO: 765 - protein, 440 aa, synthetic construct
QPPKILMFPWLALGHVNPFLRIAKQLADRGFHIYLVSTAINLEMAKKRIPEKYKDKIHLVEYRLPELPELPEHLHTTNGLPPHLNKTLHKALKESAPRLREQVKEIKPDLVLYDFLIPWAEKIAEKKGVPAVPLLTSGAALFSYFFNFLKRPGEEFPFPEIRLSKREQDKMREMFGTEPPEEDFLVPAAAGVMLMCTSEVIEGKYLEYCEKLTGVRVVPVGPPFQDPLTEDIYDPELIRWLDTKPDGSVVYVSFGSEYFLSREDMEAVARGLEESGAYFIWVARFPKGEERPLEEVLPEGFLEAAGDKGRVLDHLVPQAHILNHPATGGFISHCGWNSVMESIDFGVPIIAMPMQWDQPINARLLVRLGVAVEIRRDEDGRIHPEDIARVIREVIHGEKGERLWERVRRISARLRARREEEMDEAAARLAELCRNRRALK

SEQ ID NO: 766 - protein, 440 aa, synthetic construct
QRPRVLMFPWLALGHVNPFLRIAKQLADRGFKIYLVSTAINLEMAKKRIPEEYKDKIHLVELRLPELPELPPHYHTTNGLPPHLNKTLHKALKESAPRLKEQLKEIKPDLVLYDFLIPWAEKVAEEKGVPAVPLLTSGAALFSYFFNFLKRPGEEFPFPAIRLSKREQDKMREMFGTEPPELDFLVPAAAGIMLMCTSRVIEGEYLAYCEELTGVRVVPVGPPFQDPLTEDIYDPELIRWLDTKPEGSVVYVSFGSEYFLSREDMEAVARGLEASGANFIWVARFPKGEERPLEEVLPPGFLEAAGDKGRVLDHLVPQAHILNHPATGGFISHCGWNSVMESIDFGVPIIAMPMQWDQPINARLLVRLGVAVEIRRDEDGRVHPEEIARVLREVISGEKGKRLWARVRRISERLRAAREEEMDEAAARLAELCRNRRALK

SEQ ID NO: 767 - protein, 440 aa, synthetic construct
QRPRVLMFPWLALGHVNPFLRIAKQLAKRGFKIYLVSTAINLELAKKRIPEKYKDRIHLVELRLPELPELPPHLHTTNGLPPHLNKTLHKALKESAPRLREIVKEIKPDLVLYDFLIPWAEKVAEEKGIPAVPLLTSGAALFSYFFNFLKRPGEEFPFPEIRLSKREQDKMREMFGTEPPEEDFLAPAAAGIMLMCTSRVIEGKYLEYCEELTGVRVVPVGPPFQDPLTEDIYDPELIRWLDTKPEGSVVYVSFGSEYFLSREDMEAVARGLEASGANFIWVARFPKGEERPLEEVLPKGFLERAGDKGRVLDHLVPQAHILNHPATGGFISHCGWNSVMESIDFGVPIIAMPMQWDQPINARLLVRLGVAVEIRRDEDGRIHPEEIARVLKEVISGEKGERLRKRVRRISERLRARREEEMAAAAARLAALCRNRRAYK

SEQ ID NO: 768 - protein, 440 aa, synthetic construct
QRPRVLMFPWLGLGHVNPFLRIAKQLADRGFHIYLVSTKINLEMAKKRIPEKYKDKIHLVELRLPELPELPPHYHTTNGLPPHLNKTLHKALKESAPELREIVKEIKPDLVLYDFLVPWAEKVAAEKGIPAVPLLTSGAALFSYFFNFLKRPGEEFPFPEIRLSKREQDKMREMFGTEPPELDFLAPAAAGVMLMCTSEVIEGEYLDYCEELTGVRVVPVGPPFQDPLTEDIYDPELMRWLDTKPERSVVYVSFGSEYFLSREDMEAVARGLELSGAYFIWVARFPKGEEVPLEEVLPPGFLEAAGDKGRVLDHLVPQAHILNHPATGGFISHCGWNSVMESIDFGVPIIAMPMQWDQPINARLLVRLGVAVEIRRDEDGRVHPEEIARVIREVIHGEKGKRLRERVREISAELRARREEEMDRAAARLLELCRNRRALK

SEQ ID NO: 769 - protein, 440 aa, synthetic construct
QRPKILMFPWLALGHVNPFLRIAKQLADRGFKIYLVSTAINLELAKKRIPKEYKDRIHLVELRLPELPELPPHYHTTNGLPPHLNKTLHKALKESAPRLREQVKEIKPDLVLYDFLVPWAEKIAEEKGVPAVPLLTSGAALFSYFFNFLKRPGEEFPFPEIRLSKREQDKMREMFGTEPTELDFLAPAAAGVMLMCTSEVIEGEYLEYCEKLTGVRVVPVGAPFQDPLTEDIYDPELIRWLDTKPEGSVVYVSFGSEYFLSREDMEAVARGLEASGANFIWVARFPKGEERRLEEVLPPGFLEAAGDKGRVLDHLVPQAHILNHKATGGFISHCGWNSVMESIDFGVPIIAMPMQWDQPINARLLVRLGVAVEIRRDEDGRVHPEEIARVIREVISGEKGEELRARVRRISARLRAAREREMDEAAARLLELCLNRRALK

SEQ ID NO: 770 - protein, 440 aa, synthetic construct
QRPRVLMFPWLALGHVNPFLRIAKQLADRGFHIYLVSTAINLELAKKRIPEKYKDKIHLVELRLPELPELPPHYHTTNGLPPHLNKTLHKALKEAAPRFREIVKEIKPDLVLYDFLVPWAEKVAAEKGVPAVPLLTSGAALFSYFFNFLKRPGEEFPFPAIRLSKREQDKMREMFGTEPPEEDFLVPAAAGVMLMCTSRVIEGKYLDYCEKLTGVRVVPVGPPFQDPLTEDIYDPELIRWLDTKPEGSVVYVSFGSEYFLSREDMEAVARGLEASGANFIWVARFPKGEERPLEEVLPKGFLERAGDKGRVLDHLVPQAHILNHPATGGFISHCGWNSVMESIDFGVPIIAMPMQWDQPINARLLVRLGVAVEIRRDEDGRIHPEEIARVIRDVISGEKGKRLWERVRRISARLRARREEEMDRAAARLAELCRNRNALK

SEQ ID NO: 771 - protein, 440 aa, synthetic construct
QRPKVLMFPWLALGHVNPFLRIAKQLAKRGFEIYLVSTAINLEMAKKRIPEEYKDKIHLVELALPELPELPPHYHTTNGLPPHLNKTLHKALKESAPRFREQVKEIKPDLVLYDFLVPWAEKIAEEKGIPAVPLLTSGAALFSYFFNFLKRPGEEFPFPEIRLSKREQDKMREMFGTEPPELDFLAPAAAGVMLMCTSRVIEGEYLEYCEKLTGVRVVPVGPPFQDPLTEDIYDPELIRWLDTKPEHSVVYVSFGSEYFLSREDMEAVARGLEESGAYFIWVARFPKGEERRLEEVLPPGFLEAAGDKGRVLDHLVPQAHILNHPATGGFISHCGWNSVMESIDFGVPIIAMPMQWDQPINARLLVRLGVAVEIRRDEDGRIHPEEIARVIKEVISGEKGERLRARVRRISARLRARREEEMDAAAERLLELCRNRRAYK

SEQ ID NO: 772 - protein, 440 aa, synthetic construct
QRPRILMFPWLGLGHVNPFLRIAKQLADRGFHIYLVSTAINLELAKKRIPEKYKDRIHLVELKLPELPELPPHYHTTNGLPPHLNKTLHKALKESAPRLRKQLKEIKPDLVLYDFLVPWAEKVAAEKGIPAVPLLTSGAALFSYFFNFLKRPGEEFPFPEIRLSKREQDKMREMFGTEPPEEDFLVPAAAGIMLMCTSRVIEGKYLDYCEELTGVRVVPVGPPFQDPLTEDIDDPELIRWLDTKPERSVVYVSFGSEAFLSREDMEAVARGLLASGANFIWVARFPKGEERRLEEVLPPGFLEAAGDRGRVLDHLVPQAHILNHPATGGFISHCGWNSVMESIDFGVPIIAMPMQWDQPINARLLVSLGVAVEIRRDEDGRIHPEEIARVIREVIFGEKGKRLWERVRRISARLRAEREEEMDEAAARLRELCRNRRALK

SEQ ID NO: 773 - protein, 440 aa, synthetic construct
QRPKILMFPWLGLGHVNPFLRIAKQLAKRGFHIYLVSTKINLEMAKKRIPEEYKDKIHLVELRLPELPELPPHYHTTNGLPPHLNKTLHKALKESAPRFREIVKEIKPDLVLYDFLVPWAEKVAEEKGIPAVPLLTSGAALFSYFFNFLKRPGEEFPFPEIRLSKREQDKMREMFGTEPPELDFLVPAKSGVMLMCTSRVIEGKYLAYCEKLTGVRVVPVGAPFQDPLTEDIYDPELIRWLDTQPEHSVVYVSFGSEYFLSREDMEAVARGLLASGAYFIWVARFPKGEERPLEEVLPPGFLEAAGDKARVLDHLVPQAHILNHKATGGFISHCGWNSVMESIDFGVPIIAMPMQWDQPINARLLVRLGVAVEIRRDEDGRVHPEEIARVIKAVISGELGEELWARVRRISARLRAEREREMDAAAARLRELCRNRRALK

SEQ ID NO: 774 - protein, 440 aa, synthetic construct
QRPKVLMFPWLALGHVNPFLRIAKQLADRGFHIYLVSTKINLELAKKRIPEKYKDRIHLVELRLPELPELPEHYHTTNGLPPHLNKTLHKALKESAPRLREQVKEIKPDLVLYDFLIPWAEKVAEEKGIPAVPLLTSGAALFSYFFNFLKRPGEEFPFPEIRLSKREQDKMREMFGTEPPELDFLVPAAAGIMLMCTSRVIEGKYLDYCEELTGVRVVPVGPPFQDPLTEDIYDPELIRWLDTKPEGSVVYVSFGSEYFLSREDMEEVARGLEESGANFIWVARFPKGEERPLEEVLPPGFLERAGDRGRVLDHLVPQAHILNHPATGGFISHCGWNSVMESIDFGVPIIAMPMQWDQPINARLLVRLGVAVEIRRDEDGRVHPEEIARVIKEVISGEKGKELWARVRRISARLRARREEEMDAAAARLAELCRNRRALK

SEQ ID NO: 775 - protein, 440 aa, synthetic construct
QRPKVLMFPWLALGHVNPFLRIAKQLAKRGFHIYLVSTAINLELAKKRIPEEYKDKIHLVELRLPELPELPPHLHTTNGLPPHLNKTLHKALKESAPRFREIVKEIKPDLVLYDFLVPWAEKVAEEKGIPAVPLLTSGAALFSYFFNFLKRPGEEFPFPEIRLSKREQDKMREMFGTEPPEEDFLVPAKAGVMLMCTSRVIEGKYLAYCEELTGVRVVPVGPPFQDPLTEDIYDPELIRWLDTKPERSVVYVSFGSEYFLSREDMEAVARGLEASGAYFIWVARFPKGEERRLEEVLPPGFLEAAGDKARVLDHLVPQAHILNHPATGGFISHCGWNSVMESIDFGVPIIAMPMQWDQPINARLLVRLGVAVEIRRDEDGRIHPEEIARVIREVIYGEKGERLRARVKRISARLRARREEEMAEAAARLAALCRNRRALK

SEQ ID NO: 776 - protein, 440 aa, synthetic construct
QRPRVLMFPWLALGHVNPFLRIAKQLAKRGFKIYLVSTAINLELAKKRIPEKYKDKIHLVELALPELPELPPHLHTTNGLPPHLNKTLHKALKESAPRFREQLKEIKPDLVLYDFLIPWAEKVAAEKGIPAVPLLTSGAALFSYFFNFLKRPGEEFPFPAIRLSKREQDKMREMFGTEPPEEDFLAPAAAGVMLMCTSRVIEGKYLAYCEELTGVRVVPVGPPFQDPLTEDIDDPELIRWLDTKPERSVVYVSFGSEYFLSREDMEEVARGLEESGAYFIWVARFPKGEERPLEEVLPPGFLEAVGDRGRVLDHLVPQAHILNHPATGGFISHCGWNSVMESIDFGVPIIAMPMQWDQPINARLLVRLGVAVEIRRDEDGRIHPEEIARVIKDVISGEKGEELRARVARISARLRARREEEMDAAAARLRELCRNRNAYK

SEQ ID NO: 777 - protein, 440 aa, synthetic construct
QRPKILMFPWLGLGHVNPFLRIAKQLAKRGFKIYLVSTAINLELAKKRIPEKYKDRIHLVELRLPELPELPPHLHTTNGLPPHLNKTLHKALKEAAPRLKEQVKEIKPDLVLYDFLVPWAEKVAEEKGVPAVPLLTSGAALFSYFFNFLKRPGEEFPFPAIRLSKREQDKMREMFGTEPPELDFLVPAKAGVMLMCTSRVIEGEYLEYCEKLTGVRVVPVGPPFQDPLTEDIYDPELIRWLDTKPEGSVVYVSFGSEYFLSREDMEAVARGLLASGAYFIWVARFPKGEERPLEEVLPPGFLEAVGDKGRVLDHLVPQAHILNHPATGGFISHCGWNSVMESIDFGVPIIAMPMQWDQPINARLLVRLGVAVEIRRDEDGRVHPEEIARVIREVISGEKGKRLWENVREISARLRATREREMDAAAERLRELCLNRRALK

SEQ ID NO: 778 - protein, 440 aa, synthetic construct
QPPKILMFPWLALGHVNPFLRIAKQLADRGFKIYLVSTKINLEMAKKRIPEKYKDKIHLVEYRLPELPELPEHLHTTNGLPPHLNKTLHKALKESAPRLREIVKEIKPDLVLYDFLIPWAEKVAAEKGIPAVPLLTSGAALFSYFFNFLKRPGEEFPFPAIRLSKREQDKMREMFGTEPPEEDFLAPAAAGVMLMCTSRVIEGKYLDYCEKLTGVEVVPVGPPFQDPLTEDIYDPELIRWLDTKPEGSVVYVSFGSEYFLSREDMEEVARGLEASGANFIWVARFPKGEERPLEEVLPPGFLEAAGDKGRVLDHLVPQAHILNHKATGGFISHCGWNSVMESIDFGVPIIAMPMQWDQPINARLLVRLGVAVEIRRDEDGRIHPDEIARVIKEVISGEKGEELWARVRRISARLRARREEEMDEAAERLRELCRNRRALK

SEQ ID NO: 779 - protein, 440 aa, synthetic construct
QPLRIAMFPWLGLGHVNPFLRIAKKLADRGFYIYLCNTAINLESAKKRIPEKYSNKIHLVELRLPELPELPPHYHTTNGLPPHLNKLLKKALKAAAPEFREILKEIKPDLVIYDFLVPWAEKVAAKRGIPGVPLLTSGAALFSYFFHFLKRPGEEFPFPAIRLSKREQDKMREMFGTEPPELDFLAPAPAGIMLMCTSREIEGKYLAYCEELSGREVVPVGPPFQDPLTEDDDDPELMAWLGKKPEGSTVYVSFGSEYFLSREDMEAVARGLEASGAYFIWVARFPKGEERPLEEALPKGFLEAIGDRGRVLDHLVPQAHILNHSATGGFISHCGWNSVMESIDFGVPIIAMPMQWDQPINARLLVRLGVAVEIRRDENGRVHPEEIARVVREVIGGKLGEELRAKVRRISARLRAEREREMDEAAARLIKLCRNRNALK

SEQ ID NO: 780 - protein, 440 aa, synthetic construct
SPPRILMFPWLGLGHVNPFLRIAKKLADRGFYIYLCNTAINLELAKKRIPEKYKDKIHLVEYRLPELPELPPHYHTTNGLPPHLNGLLKKALKASAPRLREILKEIKPDLVIYDFLIPWAEKLAAERGIPAVPLLTSGAALFSYFFHFLKRPGEEFPFEEIRLSKREQDKMREMFGTEPPDEDFLAPAPAGVMLMCTSREIEGKYLDYLEKLSGREVVPVGAPFQDPLTEDDYDPELIRWLGKKPERSVVYVSFGSEYFLSREDMEEIARGLEESGAYFIWVARFPKGEERPLEEALPEGFLEAVGDRGRVLDHLVPQAHILNHPATGGFISHCGWNSVMESIDFGVPIIAMPMQWDQPINARLMVRLGVAVEIRRDEDGRVHPAEIARVIREVISGETGEKLRKKVRRISARLRARREEEMDAAAERLRELCRNRRALK

SEQ ID NO: 781 - protein, 440 aa, synthetic construct
TPLKIAMFPWLGLGHVNPFLRIAKKLADRGFYIYLCNTAINLEMIKKRIPEKYKDKIHLVELRLPELPELPPHYHTTNGLPPHLNKVLKKALKASAPRFREIVKALQPDLVIYDFLVPWAEKVAAAQGIPAVPLLTSGAALFSYFVHFLKRPGEEFPFEAIRLSKREQDKMREMFGTEPPDLDFLAPAQAGIMLMCTSREIEGKYLDYCEKLSGVEVVPVGAPFQDPLTEDIDDPELIRWLGTKPERSTVYVSFGSEYFLSREDMEAVARGLEASGAYFIWVARFPKGEERPLEEALPEGFLEAIGDRGRVLDHLVPQAHILNHPATGGFISHCGWNSVMESIDFGVPIIAMPMQWDQPINARLLVDLGVAVEIRRDENGKIHPEEIARVIREVISGETGEELRAKVRKISARLKAEREEEMDEAAARLAELCRNRRAYK

SEQ ID NO: 782 - protein, 440 aa, synthetic construct
TPPKVLMFPWLGLGHVNPFLRLAKKLAKRGFYIYLVNTAINLESAKKRIPEKYKDRIHLVELRLPELPELPPHLHTTNGLPPHLNKLLKKALKASAPRLREILKEINPDLLIYDFLIPWAEKLAAERGIPAVPLLTSGAALFSYFFNFLKKPGEEFPFPEIRLSKREQDKMREMFGTEPPDLDFLAEAPAGVMLMCTSREIEGKYLAYLEKLSGREVVPVGPPFQDPLTEDDDDKELIRWLGKKDPGSTVYVSFGSEYFLSREDMEAVARGLLASGANFIWVVRFPKGEERPLEEALPEGFLEAIGERGRVLDHLVPQAHILNHPATGGFISHCGWNSVMESIDFGVPIIAMPMQWDQPINARLLVRLGVAVEIRRDENGRVHPEEIARVIREVISGETGKNLREKVARISARLRARRDEEMDIAAARLAKLCRNRRALK

SEQ ID NO: 783 - protein, 440 aa, synthetic construct
TPPQILMFPWLALGHVNPFLRLAKKLADRGFYIYLVNTAINLESAKKRIPEKYKDRIHLVELRLPELPELPPHLHTTNGLPPHLNKLLKKALKASAPRFREILKELKPDLVIYDFLLPWAEKLAAERGVPAVPLLTSGAALFSYFVHFLKRPGEEFPFPEIRLSKREQDKMREMFGTEPPELDFLAEAPAGVMLMCTSREIEGKYLAYLEELSGREVVPVGPPFQDPLTEDDDDKELIRWLGKKPERSTVYVSFGSEYFLSREDMEEVARGLEESGANFIWVARFPKGEERRLEEALPKGFLEAVGERGRVLDHLVPQAHILNHPATGGFISHCGWNSVMESIDFGVPIIAMPMQWDQPINARLLVRLGVAVEIRRDENGRIHPEEIARVIKEVIYGETGEKLRAKVRRISARLRARREEEMTAAAARLAQLCRNRRALK

SEQ ID NO: 784 - protein, 440 aa, synthetic construct
TPLKILMFPWLALGHVNPFLRIAKKLADRGFYIYLVNTKINLELIKKRIPEEYKDRIHLVELRLPELPELPPHYHTTNGLPPHLNKTLHKALKASAPELRKQVKEIKPDLVIYDFLVPWAEKVAAARGIPAVPLLTSGAALFSYFFNFLKRPGEEFPFEEIRLSKREQDKMREMFGTEPPELDFLAEAPAGVMLMCTSREIEAKYLAYLEKLTGVEVVPVGPPFQDPLTEDDDDPELIRWLDKKPEGSTVYVSFGSEYFLSREQMEAVARGLEASGAYFIWVARFPKGEERPLEEALPKGFLEAVGDRGRVLDHLVPQAHILNHPATGGFISHCGWNSVMESIDFGVPIIAMPMQWDQPINARLIVDLGVAVEIRRDEDGKVHPEEIARVIREVIFGKLGEELRKKVADISLRLRAERKEEMDAAAARLIALCRNRRAYK

SEQ ID NO: 785 - protein, 440 aa, synthetic construct
TPPRVLMFPWLGLGHVNPFLRLAKKLAKRGFYIYLVNTAINLELAKKRIPEKYKDRIHLVELALPELPELPPHLHTTNGLPPHLNKVLHKALKASAPRFREILKEIKPDLVIYDFLIPWAEKLAAERGVPAVPLLTSGAALFAYFFHFLKRPGEEFPFEEIRLSKREQDKMREMFGTEPPDLDFLAPAPAGIMLMCTSREIEGKYLDYLEELSGREVVPVGPPFQDPLTEDDDDPELIRWLGKKPERSTVYVSFGSEYFLSREDMEAVARGLEASGANFIWVVRFPKGEERPLEEALPEGFLEAIGDRGRVLDHLVPQAHILNHPATGGFISHCGWNSVMESIDFGVPIIAMPMQWDQPINARLLVDLGVAVEIRRDENGKIHPEEIARVLREVISGETGEELRKKVARISARLKARREEEMDAAAARLAALCRNRRAYK

SEQ ID NO: 786 - protein, 440 aa, synthetic construct
QPLRVLMFPWLGLGHVNPFLRIAKKLAKRGFYIYLCSTKINLESLKKRIPEKYKDRIHLVELRLPELPELPPHYHTTNGLPPHLNKLLKKALKMAAPRLREILKEIKPDLVLYDFLIPWAEKLAAERGIPAVPLLTSGAALFSYFFNFLKRPGEEFPFEEIRLSKREQDKMREMFGTEPPEDDFLAPAPAGIMLMCTSREIEGKYIAYLEELTGREVVPVGPPFQDPLTEDDDDPELIAWLGKKPERSVVYVSFGSEYFLSREDMEAVARGLEASGANFIWVVRFPKGEERRLEEALPEGFLERVGDRGRVLDHLVPQAHILNHPATGGFISHCGWNSVMESIDFGVPIIAMPMQWDQPINARLMVELGVAVEIRRDEDGKVHPEEIARVIKEVISGETGEKLRAQVERISERLKAEREEEMDAAAERLRELCRNRRAYK

SEQ ID NO: 787 - protein, 440 aa, synthetic construct
TPLRILMFPWLGLGHVNPFLRLAKKLADRGFYIYLCNTAINLELAKKRIPEKYKDKIHLVELRLPELPELPPHLHTTNGLPPHLNKLLKKALKASAPRFREIVKELKPDLVIYDFLLPWAEKLAAERGIPAVPLLTSGAALFSYFFHFLKRPGEEFPFPEIRLSKREQDKMREMFGTEPPELDFLAPAPAGIMLMCTSREIEGKYLAYLEELTGREVVPVGPPFQDPLTEDDYDPELIRWLGKKDEGSVVYVSFGSEYFLSREDMEAVARGLEASGANFIWVARFPKGEERPLEEALPKGFLERIGERGRVLDHLVPQAHILNHPATGGFISHCGWNSVMESIDFGVPIIAMPMQWDQPINARLLVRLGVAVEIRRDENGRVHPEEIARVLREVIYGKTGEELRKKVREISARLKAEREEEMDAAAARLAQLCRNRRALK

SEQ ID NO: 788 - protein, 440 aa, synthetic construct
TPLRILMFPWLGLGHVNPFLRIAKKLAKRGFYIYLVSTAINLEMIKKRIPEEYVDKIHLVELRLPELPELPPHYHTTNGLPPHLNKLLKKALKAAAPRLREQVKAIKPDLVIYDFLLPWAEKLAAARGIPAVPLLTSGAALFSYFFNFVKRPGEEFPFPAIRLSKREQDKMREMFGTEPPELDFLAPAPAGIMLMCTSREIEGKYLAYCEELSGREVVPVGPPFQDPLTEDDDDPELMRWLGKKPEGSTVYVSFGSEYFLSREQMEAIARGLELSGVNFIWVVRFPKGEERRLEEALPEGFLEAVGDRGRVLDHLVPQAHILNHPATGGFISHCGWNSVMESIDFGVPIIAMPMQWDQPINARLLVDLGVAVEIRRDEDGRIHPEEIARVIREVISGKTGENLREKVAEISARLRAEREREMDEAAARLAKLCRNRRAYK

SEQ ID NO: 789 - protein, 440 aa, synthetic construct
QTPKILMFPWLALGHVNPFLRIAKQLADRGFHIYLVSTAINLELAKKRIPEKYKDKITLVEYELPELPELPPHLHTTNGLPPHLNGTLHKALKMSAPRFDEIVKELQPDLVLYDYLIPWAEKIAEKHGVPGVPLLTTGAALFSYFFNFLKRPGHEFPFPAIRLSKREQDKMREMFGTEPTELDFLVPANAGIMLMCTSEVIEAPYLEYCQKLTNVEVVPVGAPFQDPLTEDIYDPELIAWLDTKPPGSVVYVSFGSEYFLSREQMHEVAEGLLESGVNFIWVARFPKGEEQPLEEVLPEGFLERIGDRGRVLDHLVPQAHILNHPATGGFISHCGWNSVMESIDFGVPIIAMPMQWDQPIIARLLVELGVAVEIRRDEDGRIHREWIAETIREVIYGPTGETLRAQVAKIAAQLRAAREAEMDRAAERLLQLCLNRRALK

SEQ ID NO: 790 - protein, 440 aa, synthetic construct
QTPKILMFPFLALGHVNPFLRIAKQLADRGFHIYLVSTAINLELAKKRIPEKYKDKITLVEYELPELPELPPHLHTTNGLPPHLNGTLHKALKMSAPRFDEIVKELQPDLVLYDFLIPWAEKIAEKHGVPGVPLLTSGAALFSYFFNFLKRPGHEFPFPAIRLSKREQDKMREMFGTEPTELDFLVPANAGIMLMCTSEVIEAPYLEYCQKLTNVEVVPVGAPFQDPLTEDIYDPELIAWLDTKPPGSVVFVSFGSEYFLSREQMHEVAEGLLESGVNFIWVARFPKGEEQPLEEVLPEGFLERIGDRGRVLDHLVPQAHILNHPATGGFISHCGWNSVMESIDFGVPIIAMPMQWDQPINARLLVELGVAVEIRRDEDGRIHREWIAETIREVIYGPTGETLRAQVAKIAAQLRAAREAEMDRAAERLLQLCLNRRALK

SEQ ID NO: 791 - protein, 440 aa, synthetic construct
QTPKILMFPWLALGHVNPFLRIAKQLADRGFHIYLVSTAINLELAKKRIPEKYKDKITLVEYELPELPELPPHLHTTNGLPPHLNGTLHKALKMSAPRFDEIVKELQPDLVLYDFLIPWAEKIAEKHGVPGVPLLTSGAALFSYFFNFLKRPGHEFPFPAIRLSKREQDKMREMFGTEPTELDFLVPANAGIMLMCTSEVIEAPYLEYCQKLTNVEVVPVGAPFQDPLTEDIYDPELIAWLDTKPPGSVVYVSFGSEYFLSREQMHEVAEGLLESGVNFIWVARFPKGEEQPLEEVLPEGFLERIGDRGRVLDHFVPQAHILNHPATGGFISHCGWNSVMESIDFGVPIIAMPMQWDQPINARLLVELGVAVEIRRDEDGRIHREWIAETIREVIYGPTGETLRAQVAKIAAQLRAAREAEMDRAAERLLQLCLNRRALK

SEQ ID NO: 792 - protein, 440 aa, synthetic construct
QTPKILMFPWLALGHVNPFLRIAKQLADRGFHIYLVSTAINLELAKKRIPEKYKDKITLVEYELPELPELPPHLHTTNGLPPHLNGTLHKALKMSAPRFDEIVKELQPDLVLYDFLIPWAEKIAEKHGVPGVPLLTSGAALFSYFFNFLKRPGHEFPFPAIRLSKREQDKMREMFGTEPTELDFLVPANAGIMLMCTSEVIEAPYLEYCQKLTNVEVVPVGAPFMDPLTEDIYDPELIAWLDTKPPGSVVYVSFGSEYFLSREQMHEVAEGLLESGVNFIWVARFPKGEEQPLEEVLPEGFLERIGDRGRVLDHLVPQDHILNHPATGGFISHCGWNSVMESIDFGVPIIAMPMQWDQPINARLLVELGVAVEIRRDEDGRIHREWIAETIREVIYGPTGETLRAQVAKIAAQLRAAREAEMDRAAERLLQLCLNRRALK

SEQ ID NO: 793 - protein, 440 aa, synthetic construct
QTPKILMFPWLALGHVNPFLRIAKQLADRGFHIYLVSTAINLELAKKRIPEKYKDKITLVEYELPELPELPPHLHTTNGLPPHLNGTLHKALKMSAPRFDEIVKELQPDLVLYDFLIPWAEKIAEKHGVPGVPLLTAGAALFSYFFNFLKRPGHEFPFPAIRLSKREQDKMREMFGTEPTELDFLVPANAGIMLMCTSEVIEAPYLEYCQKLTNVEVVPVGAPFLDPLTEDIYDPELIAWLDTKPPGSVVYVSFGSEYFLSREQMHEVAEGLLESGVNFIWVARFPKGEEQPLEEVLPEGFLERIGDRGRVLDHLVPQAHILNHPATGGFISHCGWNSVMESIDFGVPIIAMPMIWDQPINARLLVELGVAVEIRRDEDGRIHREWIAETIREVIYGPTGETLRAQVAKIAAQLRAAREAEMDRAAERLLQLCLNRRALK

SEQ ID NO: 794 - protein, 440 aa, synthetic construct
QTPKILMFPWLALGHVNPFLRIAKQLADRGFHIYLVSTAINLELAKKRIPEKYKDKITLVEYELPELPELPPHLHTTNGLPPHLNGTLFKALKMSAPRFDEIVKELQPDLVLYDILIPWAEKIAEKHGVPGVPLLTTGAALFSYFFNFLKRPGHEFPFPAIRLSKREQDKMREMFGTEPTELDFLVPANAGIMLMCTSEVIEAPYLEYCQKLTNVEVVPVGAPFQDPLTEDIYDPELIAWLDTKPPGSVVYVSFGSEYFLSREQMHEVAEGLLESGVNFIWVARFPKGEEQPLEEVLPEGFLERIGDRGRVLDHLVPQAHILNHPATGGFISHCGWNSVMESIDFGVPIIAMPMQWDQPINARLLVELGVAVEIRRDEDGRIHREWIAETIREVIYGPTGETLRAQVAKIAAQLRAAREAEMDRAAERLLQLCLNRRALK

SEQ ID NO: 795 - protein, 440 aa, synthetic construct
QTPKILMFPWLALGHVNPFLRIAKQLADRGFHIYLVSTAINLELAKKRIPEKYKDKITLVEYELPELPELPPHLHTTNGLPPHLNGTLHKALKMSAPRFDEIVKELQPDLVLYDFLIPWAEKIAEKHGVPGVPLLTSGAALFSYFFNFLKRPGHEFPFPAIRLSKREQDKMREMFGTEPTELDFLVPANAGIMLMCTSEVIEAPYLEYCQKLTNVEVVPVGAPFQDPLTEDIYDPELIAWLDTKPPGSVVLVIFGSEYFLSREQMHEVAEGLLESGVNFIWVARFPKGEEQPLEEVLPEGFLERIGDRGRVLDHLVPQAHILNHPATGGFISHCGWNSVMESIDFGVPIIAMPMQWDQPINARLLVELGVAVEIRRDEDGRIHREWIAETIREVIYGPTGETLRAQVAKIAAQLRAAREAEMDRAAERLLQLCLNRRALK

SEQ ID NO: 796 - protein, 440 aa, synthetic construct
QTPKILMFPFLALGHVNPFLRIAKQLADRGFHIYLVSTAINLELAKKRIPEKYKDKITLVEYELPELPELPPHLHTTNGLPPHLNGTLFKALKMSAPRFDEIVKELQPDLVLYDFLIPWAEKIAEKHGVPGVPLLTTGAALFSYFFNFLKRPGHEFPFPAIRLSKREQDKMREMFGTEPTELDFLVPANAGIMLMCTSEVIEAPYLEYCQKLTNVEVVPVGAPFQDPLTEDIYDPELIAWLDTKPPGSVVYVSFGTEYFLSREQMHEVAEGLLESGVNFIWVARFPKGEEQPLEEVLPEGFLERIGDRGRVLDHLVPQAHILNHPATGGFISHCGWNSVMESIDFGVPIIAMPMQWDQPINARLLVELGVAVEIRRDEDGRIHREWIAETIREVIYGPTGETLRAQVAKIAAQLRAAREAEMDRAAERLLQLCLNRRALK

SEQ ID NO: 797 - protein, 440 aa, synthetic construct
QTPKILMFPWLALGHVNPFLRIAKQLADRGFHIYLVSTAINLELAKKRIPEKYKDKITLVEYELPELPELPPHLHTTNGLPPHLNGTLHKALKMSAPRFDEIVKELQPDLVLYDFLIPWAEKIAEKHGVPGVPLLTTGAALFSYFFNFLKRPGHEFPFPAIRLSKREQDKMREMFGTEPTELDFLVPANAGIMLMCTSEVIEAPYLEYCQKLTNVEVVPVGAPFQDPLTEDIYDPELIAWLDTKPPGSVVYVSFGSEYFLSREQMHEVAEGLLESGVNFIWVARFPKGEEQPLEEVLPEGFLERIGDRGRVLDHLVPQAHILNHPATGGFISHCGWNSVMESIDFGVPIIAMPMQWDQPINARLLVELGVAVEIRRDEDGRIHREWIAETIREVIYGPTGETLRAQVAKIAAQLRAAREAEMDRAAERLLQLCLNRRALK

SEQ ID NO: 798 - protein, 440 aa, synthetic construct
QTPKILMFPWLALGHVNPFLRIAKQLADRGFHIYLVSTAINLELAKKRIPEKYKDKITLVEYELPELPELPPHLHTTNGLPPHLNGTLHKALKMSAPRFDEIVKELQPDLVLYDFLIPWAEKIAEKHGVPGVPLLTSGAALFSYFFNFLKRPGHEFPFPAIRLSKREQDKMREMFGTEPTELDFLVPANAGIMLMCTSEVIEAPYLEYCQKLTNVEVVPVGAPFQDPLTEDIYDPELIAWLDTKPPGSVVYVSFGTEYFLSREQMHEVAEGLLESGVNFIWVARFPKGEEQPLEEVLPEGFLERIGDRGRVLDHLVPQAHILNHPATGGFISHCGWNSVMESIDFGVPIIAMPMQWDQPINARLLVELGVAVEIRRDEDGRIHREWIAETIREVIYGPTGETLRAQVAKIAAQLRAAREAEMDRAAERLLQLCLNRRALK

SEQ ID NO: 799 - protein, 440 aa, synthetic construct
QTPKILMFPWLALGHVNPFLRIAKQLADRGFHIYLVSTAINLELAKKRIPEKYKDKITLVEYELPELPELPPHLHTTNGLPPHLNGTLHKALKMSAPRFDEIVKELQPDLVLYDFLIPWAEKIAEKHGVPGVPLLTSGAALFSYFFNFLKRPGHEFPFPAIRLSKREQDKMREMFGTEPTELDFLVPANAGIMLMCTSEVIEAPYLEYCQKLTNVEVVPVGAPFQDPLTEDIYDPELIAWLDTKPPGSVVYVSFGSEYFLSREQMHEVAEGLLESGVNFIWVARFPKGEEQPLEEVLPEGFLERIGDRGRVLDHLVPQAHILNHPATGGFISHCGWNSVMESIDFGVPIIAMPMQWDQPIIARLLVELGVAVEIRRDEDGRIHREWIAETIREVIYGPTGETLRAQVAKIAAQLRAAREAEMDRAAERLLQLCLNRRALK

SEQ ID NO: 800 - protein, 440 aa, synthetic construct
QTPKILMFPWLALGHVNPFLRIAKQLADRGFHIYLVSTAINLELAKKRIPEKYKDKITLVEYELPELPELPPHLHTTNGLPPHLNGTLHKALKMSAPRFDEIVKELQPDLVLYDFLIPWAEKIAEKHGVPGVPLLASGAALFSYFFNFLKRPGHEFPFPAIRLSKREQDKMREMFGTEPTELDFLVPANAGIMLMCTSEVIEAPYLEYCQKLTNVEVVPVGAPFQDPLTEDIYDPELIAWLDTKPPGSVVYVSFGSEYFLSREQMHEVAEGLLESGVNFIWVARFPKGEEQPLEEVLPEGFLERIGDRGRVLDHLVPQAHILNHPATGGFISHCGWNSVMESIDFGVPIIAMPMQWDQPINARLLVELGVAVEIRRDEDGRIHREWIAETIREVIYGPTGETLRAQVAKIAAQLRAAREAEMDRAAERLLQLCLNRRALK

SEQ ID NO: 801 - protein, 440 aa, synthetic construct
QTPKILMFPWLALGHVNPFLRIAKQLADRGFHIYLVSTAINLELAKKRIPEKYKDKITLVEYELPELPELPPHLHTTNGLPPHLNGTLHKALKMSAPRFDEIVKELQPDLVLYDFLIPWAEKIAEKHGVPGVPLLTSGAALFSYFFNFLKRPGHEFPFPAIRLSKREQDKMREMFGTEPTELDFLVPANAGIMLMCTSEVIEAPYLEYCQKLTNVEVVPVGAPFQDPLTEDIYDPELIAWLDTKPPGSVVFVSFGSEYFLSREQMHEVAEGLLESGVNFIWVARFPKGEEQPLEEVLPEGFLERIGDRGRVLDHLVPLAHILNHPATGGFISHCGWNSVMESIDFGVPIIAMPMQWDQPINARLLVELGVAVEIRRDEDGRIHREWIAETIREVIYGPTGETLRAQVAKIAAQLRAAREAEMDRAAERLLQLCLNRRALK

SEQ ID NO: 802 - protein, 440 aa, synthetic construct
QTPKILMFPWLAYGHVNPFLRIAKQLADRGFHIYLVSTAINLELAKKRIPEKYKDKITLVEYELPELPELPPHLHTTNGLPPHLNGTLHKALKMSAPRFDEIVKELQPDLVLYDFLIPWAEKIAEKHGVPGVPLLTSGAALFSYFFNFLKRPGHEFPFPAIRLSKREQDKMREMFGTEPTELDFLVPANAGIMLMCTSEVIEAPYLEYCQKLTNVEVVPVGAPFQDPLTEDIYDPELIAWLDTKPPGSVVYVSFGSEYFLSREQMHEVAEGLLESGVNFIWVARFPKGEEQPLEEVLPEGFLERIGDRGRVLDHLVPQAHILNHPATGGFISHCGWNSVMESIDFGVPIIAMPMQLDQPINARLLVELGVAVEIRRDEDGRIHREWIAETIREVIYGPTGETLRAQVAKIAAQLRAAREAEMDRAAERLLQLCLNRRALK

SEQ ID NO: 803 - protein, 440 aa, synthetic construct
QTPKILMFPWLALGHVNPFLRIAKQLADRGFHIYLVSTAINLELAKKRIPEKYKDKITLVEYELPELPELPPHLHTTNGLPPHLNGTLYKALKMSAPRFDEIVKELQPDLVLYDFLIPWAEKIAEKHGVPGVPLLTSGAALFSYFFNFLKRPGHEFPFPAIRLSKREQDKMREMFGTEPTELDFLVPANAGIMLMCTSEVIEAPYLEYCQKLTNVEVVPVGAPFQDPLTEDIYDPELIAWLDTKPPGSVVYVSFGSEYFLSREQMHEVAEGLLESGVNFIWVARFPKGEEQPLEEVLPEGFLERIGDRGRVLDHLVPQAHILNHPATGGFISHCGWNSVMESIDFGVPIIAMPMQWDQPINARLLVELGVAVEIRRDEDGRIHREWIAETIREVIYGPTGETLRAQVAKIAAQLRAAREAEMDRAAERLLQLCLNRRALK

SEQ ID NO: 804 - protein, 440 aa, synthetic construct
QTPKILMFPWLAFGHVNPFLRIAKQLADRGFHIYLVSTAINLELAKKRIPEKYKDKITLVEYELPELPELPPHLHTTNGLPPHLNGTLHKALKMSAPRFDEIVKELQPDLVLYDFLIPWAEKIAEKHGVPGVPLLTSGAALFSYFFNFLKRPGHEFPFPAIRLSKREQDKMREMFGTEPTELDFLVPANAGIMLMCTSEVIEAPYLEYCQKLTNVEVVPVGAPFQDPLTEDIYDPELIAWLDTKPPGSVVYVSFGSEYFLSREQMHEVAEGLLESGVNFIWVARFPKGEEQPLEEVLPEGFLERIGDRGRVLDHLVPQAHILNHPATGGFISHCGWNSVMESIDFGVPIIAMPMHWDQPINARLLVELGVAVEIRRDEDGRIHREWIAETIREVIYGPTGETLRAQVAKIAAQLRAAREAEMDRAAERLLQLCLNRRALK

SEQ ID NO: 805 - protein, 440 aa, synthetic construct
QTPKILMFPWLAHGHVNPFLRIAKQLADRGFHIYLVSTAINLELAKKRIPEKYKDKITLVEYELPELPELPPHLHTTNGLPPHLNGTLHKALKMSAPRFDEIVKELQPDLVLYDFLIPWAEKIAEKHGVPGVPLLTTGAALFSYFFNFLKRPGHEFPFPAIRLSKREQDKMREMFGTEPTELDFLVPANAGIMLMCTSEVIEAPYLEYCQKLTNVEVVPVGAPFQDPLTEDIYDPELIAWLDTKPPGSVVYVSFGSEYFLSREQMHEVAEGLLESGVNFIWVARFPKGEEQPLEEVLPEGFLERIGDRGRVLDHLVPQAHILNHPATGGFISHCGWNSVMESIDFGVPIIAMPMQWDQPINARLLVELGVAVEIRRDEDGRIHREWIAETIREVIYGPTGETLRAQVAKIAAQLRAAREAEMDRAAERLLQLCLNRRALK

SEQ ID NO: 806 - protein, 440 aa, synthetic construct
QTPKILMFPWLAYGHVNPFLRIAKQLADRGFHIYLVSTAINLELAKKRIPEKYKDKITLVEYELPELPELPPHLHTTNGLPPHLNGTLHKALKMSAPRFDEIVKELQPDLVLYDILIPWAEKIAEKHGVPGVPLLTSGAALFSYFFNFLKRPGHEFPFPAIRLSKREQDKMREMFGTEPTELDFLVPANAGIMLMCTSEVIEAPYLEYCQKLTNVEVVPVGAPFQDPLTEDIYDPELIAWLDTKPPGSVVYVSFGSEYFLSREQMHEVAEGLLESGVNFIWVARFPKGEEQPLEEVLPEGFLERIGDRGRVLDHLVPQAHILNHPATGGFISHCGWNSVMESIDFGVPIIAMPMQWDQPINARLLVELGVAVEIRRDEDGRIHREWIAETIREVIYGPTGETLRAQVAKIAAQLRAAREAEMDRAAERLLQLCLNRRALK

SEQ ID NO: 807 - protein, 440 aa, synthetic construct
QTPKILMFPWLALGHVFPFLRIAKQLADRGFHIYLVSTAINLELAKKRIPEKYKDKITLVEYELPELPELPPHLHTTNGLPPHLNGTLHKALKMSAPRFDEIVKELQPDLVLYDFLIPWAEKIAEKHGVPGVPLLTSGAALFSYFFNFLKRPGHEFPFPAIRLSKREQDKMREMFGTEPTELDFLVPANAGIMLMCTSEVIEAPYLEYCQKLTNVEVVPVGAPFSDPLTEDIYDPELIAWLDTKPPGSVVYVSFGSEYFLSREQMHEVAEGLLESGVNFIWVARFPKGEEQPLEEVLPEGFLERIGDRGRVLDHLVPQAHILNHPATGGFISHCGWNSVMESIDFGVPIIAMPMQWDQPINARLLVELGVAVEIRRDEDGRIHREWIAETIREVIYGPTGETLRAQVAKIAAQLRAAREAEMDRAAERLLQLCLNRRALK

SEQ ID NO: 808 - protein, 440 aa, synthetic construct
QTPKILMFPWLAFGHVNPFLRIAKQLADRGFHIYLVSTAINLELAKKRIPEKYKDKITLVEYELPELPELPPHLHTTNGLPPHLNGTLHKALKMSAPRFDEIVKELQPDLVLYDILIPWAEKIAEKHGVPGVPLLTSGAALFSYFFNFLKRPGHEFPFPAIRLSKREQDKMREMFGTEPTELDFLVPANAGIMLMCTSEVIEAPYLEYCQKLTNVEVVPVGAPFQDPLTEDIYDPELIAWLDTKPPGSVVYVSFGSEYFLSREQMHEVAEGLLESGVNFIWVARFPKGEEQPLEEVLPEGFLERIGDRGRVLDHLVPQAHILNHPATGGFISHCGWNSVMESIDFGVPIIAMPMQWDQPINARLLVELGVAVEIRRDEDGRIHREWIAETIREVIYGPTGETLRAQVAKIAAQLRAAREAEMDRAAERLLQLCLNRRALK

SEQ ID NO: 809 - protein, 440 aa, synthetic construct
QTPKILMFPWLALGHVNPFLRIAKQLADRGFHIYLVSTAINLELAKKRIPEKYKDKITLVEYELPELPELPPHLHTTNGLPPHLNGTLHKALKMSAPRFDEIVKELQPDLVLYDFLIPWAEKIAEKHGVPGVPLLTSGAALFSYFFNFLKRPGHEFPFPAIRLSKREQDKMREMFGTEPTELDFLVPANAGIMLMCTSEVIEAPYLEYCQKLTNVEVVPVGAPFMDPLTEDIYDPELIAWLDTKPPGSVVYVSFGSEYFLSREQMHEVAEGLLESGVNFIWVARFPKGEEQPLEEVLPEGFLERIGDRGRVLDHLVPQAHILNHPATGGFISHCGWNSVMESIDFGVPIIAMPMQWDQPINARLLVELGVAVEIRRDEDGRIHREWIAETIREVIYGPTGETLRAQVAKIAAQLRAAREAEMDRAAERLLQLCLNRRALK

SEQ ID NO: 810 - protein, 440 aa, synthetic construct
QTPKILMFPWLALGHVNPFLRIAKQLADRGFHIYLVSTAINLELAKKRIPEKYKDKITLVEYELPELPELPPHLHTTNGLPPHLNGTLFKALKMSAPRFDEIVKELQPDLVLYDVLIPWAEKIAEKHGVPGVPLLTSGAALFSYFFNFLKRPGHEFPFPAIRLSKREQDKMREMFGTEPTELDFLVPANAGIMLMCTSEVIEAPYLEYCQKLTNVEVVPVGAPFQDPLTEDIYDPELIAWLDTKPPGSVVYVSFGSEYFLSREQMHEVAEGLLESGVNFIWVARFPKGEEQPLEEVLPEGFLERIGDRGRVLDHLVPQAHILNHPATGGFISHCGWNSVMESIDFGVPIIAMPMQWDQPINARLLVELGVAVEIRRDEDGRIHREWIAETIREVIYGPTGETLRAQVAKIAAQLRAAREAEMDRAAERLLQLCLNRRALK

SEQ ID NO: 811 - protein, 440 aa, synthetic construct
QTPKILMFPWLALGHVNPFLRIAKQLADRGFHIYLVSTAINLELAKKRIPEKYKDKITLVEYELPELPELPPHLHTTNGLPPHLNGTLHKALKMSAPRFDEIVKELQPDLVLYDFLIPWAEKIAEKHGVPGVPLLTSGAALFSYFFNFLKRPGHEFPFPAIRLSKREQDKMREMFGTEPTELDFLVPANAGIMLMCTSEVIEAPYLEYCQKLTNVEVVPVGAPFQDPLTEDIYDPELIAWLDTKPPGSVVYVSFGSEYFLSREQMHEVAEGLLESGVNFIWVARFPKGEEQPLEEVLPEGFLERIGDRGRVLDHLVPQAHILNHPATGGFISHCGWNSVMESIDFGVPIIAMPMQLDQPINARLLVELGVAVEIRRDEDGRIHREWIAETIREVIYGPTGETLRAQVAKIAAQLRAAREAEMDRAAERLLQLCLNRRALK

SEQ ID NO: 812 - protein, 440 aa, synthetic construct
QTPKILMFPWLALGHVNPFLRIAKQLADRGFHIYLVSTAINLELAKKRIPEKYKDKITLVEYELPELPELPPHLHTTNGLPPHLNGTLHKALKMSAPRFDEIVKELQPDLVLYDFLIPWAEKIAEKHGVPGVPLLTSGAAFFSYFFNFLKRPGHEFPFPAIRLSKREQDKMREMFGTEPTELDFLVPANAGIMLMCTSEVIEAPYLEYCQKLTNVEVVPVGAPFQDPLTEDIYDPELIAWLDTKPPGSVVYVSFGSEYFLSREQMHEVAEGLLESGVNFIWVARFPKGEEQPLEEVLPEGFLERIGDRGRVLDHLVPQAHILNHPATGGFISHCGWNSVMESIDFGVPIIAMPMQWDQPINARLLVELGVAVEIRRDEDGRIHREWIAETIREVIYGPTGETLRAQVAKIAAQLRAAREAEMDRAAERLLQLCLNRRALK

SEQ ID NO: 813 - protein, 440 aa, synthetic construct
QTPKILMFPWLALGHVNPFLRIAKQLADRGFHIYLVSTAINLELAKKRIPEKYKDKITLVEYELPELPELPPHLHTTNGLPPHLNGTLHKALKMSAPRFDEIVKELQPDLVLYDFLIPWAEKIAEKHGVPGVPLLTSGAALFSYFFNFLKRPGHEFPFPAIRLSKREQDKMREMFGTEPTELDFLVPANAGIMLMCTSEVIEAPYLEYCQKLTNVEVVPVGAPFMDPLTEDIYDPELIAWLDTKPPGSVVYVSFGSEYFLSREQMHEVAEGLLESGVNFIWVARFPKGEEQPLEEVLPEGFLERIGDRGRVLDHMVPQAHILNHPATGGFISHCGWNSVMESIDFGVPIIAMPMQWDQPINARLLVELGVAVEIRRDEDGRIHREWIAETIREVIYGPTGETLRAQVAKIAAQLRAAREAEMDRAAERLLQLCLNRRALK

SEQ ID NO: 814 - protein, 440 aa, synthetic construct
QTPKILMFPWLALGHVNPFLRIAKQLADRGFHIYLVSTAINLELAKKRIPEKYKDKITLVEYELPELPELPPHLHTTNGLPPHLNGTLHKALKMSAPRFDEIVKELQPDLVLYDFLIPWAEKIAEKHGVPGVPLLTSGAALFSYFFNFLKRPGHEFPFPAIRLSKREQDKMREMFGTEPTELDFLVPANAGIMLMCTSEVIEAPYLEYCQKLTNVEVVPVGAPFRDPLTEDIYDPELIAWLDTKPPGSVVYVSFGSEYFLSREQMHEVAEGLLESGVNFIWVARFPKGEEQPLEEVLPEGFLERIGDRGRVLDHLVPQAHILNHPATGGFISHCGWNSVMESIDFGVPIIAMPMQWDQPINARLLVELGVAVEIRRDEDGRIHREWIAETIREVIYGPTGETLRAQVAKIAAQLRAAREAEMDRAAERLLQLCLNRRALK

SEQ ID NO: 815 - protein, 440 aa, synthetic construct
QTPKILMFPWLALGHVNPFLRIAKQLADRGFHIYLVSTAINLELAKKRIPEKYKDKITLVEYELPELPELPPHLHTTNGLPPHLNGTLHKALKMSAPRFDEIVKELQPDLVLYDFLIPWAEKIAEKHGVPGVPLLTSGAALFSYFFNFLKRPGHEFPFEAIRLSKREQDKMREMFGTEPPEEDFLVPANAGIMLMCTSEVIEAPYLEYCQKLTNVEVVPVGAPFQDPLTEDIYDPELIAWLDTKPPGSVVYVSFGSEYFLSREQMHEVAEGLLESGVNFIWVARFPKGEEQPLEEVLPEGFLERIGDRGRVLDHLVPQAHILNHPATGGFISHCGWNSVMESIDFGVPIIAMPMQWDQPINARLLVELGVAVEIRRDEDGRIHREWIAETIREVIYGPTGETLRAQVAKIAAQLRAAREAEMDRAAERLLQLCLNRRALK

SEQ ID NO: 816 - protein, 440 aa, synthetic construct
QTPKILMFPWLALGHVNPFLRIAKQLADRGFHIYLVSTAINLELAKKRIPEKYKDKITLVEYELPELPELPPHLHTTNGLPPHLNGTLHKALKMSAPRFDEIVKELQPDLVLYDFLIPWAEKIAEKHGVPGVPLLTSGAALFSYFFNFLKRPGSEFPFPAIRLSKREQDKMREMFGTEPNEEDFLVPANAGIMLMCTSEVIEAPYLEYCQKLTNVEVVPVGAPFQDPLTEDIYDPELIAWLDTKPPGSVVYVSFGSEYFLSREQMHEVAEGLLESGVNFIWVARFPKGEEQPLEEVLPEGFLERIGDRGRVLDHLVPQAHILNHPATGGFISHCGWNSVMESIDFGVPIIAMPMQWDQPINARLLVELGVAVEIRRDEDGRIHREWIAETIREVIYGPTGETLRAQVAKIAAQLRAAREAEMDRAAERLLQLCLNRRALK

SEQ ID NO: 817 - protein, 440 aa, synthetic construct
QTPKILMFPWLGLGHVSPFLRIAKQLADRGFHIYLVSTAINLELAKKRIPEKYKDKITLVEYELPELPELPPHLHTTNGLPPHLNGTLHKALKMSAPRFDEIVKELQPDLVLYDFLIPWAEKIAEKHGVPGVPLLTSGAALFSYFFNFLKRPGHEFPFPAIRLSKREQDKMREMFGTEPTEEDFLVPANAGIMLMCTSEVIEAPYLEYCQKLTNVEVVPVGAPFQDPLTEDIYDPELIAWLDTKPPGSVVYVSFGSEYFLSREQMHEVAEGLLESGVNFIWVARFPKGEEQPLEEVLPEGFLERIGDRGRVLDHLVPQAHILNHPATGGFISHCGWNSVMESIDFGVPIIAMPMQWDQPINARLLVELGVAVEIRRDEDGRIHREWIAETIREVIYGPTGETLRAQVAKIAAQLRAAREAEMDRAAERLLQLCLNRRALK

SEQ ID NO: 818 - protein, 440 aa, synthetic construct
QTPKILMFPWLALGHVNPFLRIAKQLADRGFHIYLVSTAINLELAKKRIPEKYKDKITLVEYELPELPELPPHLHTTNGLPPHLNGTLHKALKMSAPRFDEIVKELQPDLVLYDFLIPWAEKIAEKHGVPGVPLLTSGAALFSYFFNFLKRPGHEFPFPAIRLSKREQDKRREFFGTEPTELDFLVPANAGIMLMCTSEVIEAPYLEYCQKLTNVEVVPVGAPFQDPLTEDIYDPELIAWLDTKPPGSVVYVSFGSEYFLSREQMHEVAEGLLESGVNFIWVARFPKGEEQPLEEVLPEGFLERIGDRGRVLDHLVPQAHILNHPATGGFISHCGWNSVMESIDFGVPIIAMPMQLDQPINARLLVELGVAVEIRRDEDGRIHREWIAETIREVIYGPTGETLRAQVAKIAAQLRAAREAEMDRAAERLLQLCLNRRALK

SEQ ID NO: 819 - protein, 440 aa, synthetic construct
QTPKILMFPWLGLGHVNPFLRIAKQLADRGFHIYLVSTAINLELAKKRIPEKYKDKITLVEYELPELPELPPHLHTTNGLPPHLNGTLHKALKMSAPRFDEIVKELQPDLVLYDFLIPWAEKIAEKHGVPGVPLLTSGAALFSYFFNFLKRPGHEFPFPAIRLSKREQDKTREFFGTEPTELDFLVPANAGIMLMCTSEVIEAPYLEYCQKLTNVEVVPVGAPFQDPLTEDIYDPELIAWLDTKPPGSVVYVSFGSEYFLSREQMHEVAEGLLESGVNFIWVARFPKGEEQPLEEVLPEGFLERIGDRGRVLDHLVPQAHILNHPATGGFISHCGWNSVMESIDFGVPIIAMPMQWDQPINARLLVELGVAVEIRRDEDGRIHREWIAETIREVIYGPTGETLRAQVAKIAAQLRAAREAEMDRAAERLLQLCLNRRALK

SEQ ID NO: 820 - protein, 440 aa, synthetic construct
QTPKILMFPWLALGHVNPFLRIAKQLADRGFHIYLVSTAINLELAKKRIPEKYKDKITLVEYELPELPELPPHLHTTNGLPPHLNGTLHKALKMSAPRFDEIVKELQPDLVLYDFLIPWAEKIAEKHGVPGVPLLTSGAAAFSYFFNFLKRPGHEFPFPAIRLSKREQDKMREMFGTEPTEEDFLVPANAGIMLMCTSEVIEAPYLEYCQKLTNVEVVPVGAPFQDPLTEDIYDPELIAWLDTKPPGSVVYVSFGSEYFLSREQMHEVAEGLLESGVNFIWVARFPKGEEQPLEEVLPEGFLERIGDRGRVLDHLVPQAHILNHPATGGFISHCGWNSVMESIDFGVPIIAMPMQLDQPINARLLVELGVAVEIRRDEDGRIHREWIAETIREVIYGPTGETLRAQVAKIAAQLRAAREAEMDRAAERLLQLCLNRRALK

SEQ ID NO: 821 - protein, 440 aa, synthetic construct
QTPKILMFPWLALGHVNPFLRIAKQLADRGFHIYLVSTAINLELAKKRIPEKYKDKITLVEYELPELPELPPHLHTTNGLPPHLNGTLHKALKMSAPRFDEIVKELQPDLVLYDFLIPWAEKIAEKHGVPGVPLLTSGAALFSYYFNFLKRPGHEFPFPAIRLSKREQDKMREMFGTEPTEEDFLVPANAGIMLMCTSEVIEAPYLEYCQKLTNVEVVPVGAPFQDPLTEDIYDPELIAWLDTKPPGSVVYVSFGSEYFLSREQMHEVAEGLLESGVNFIWVARFPKGEEQPLEEVLPEGFLERIGDRGRVLDHLVPQAHILNHPATGGFISHCGWNSVMESIDFGVPIIAMPMQVDQPINARLLVELGVAVEIRRDEDGRIHREWIAETIREVIYGPTGETLRAQVAKIAAQLRAAREAEMDRAAERLLQLCLNRRALK

SEQ ID NO: 822 - protein, 440 aa, synthetic construct
QTPKILMFPWLGLGHVNPFLRIAKQLADRGFHIYLVSTAINLELAKKRIPEKYKDKITLVEYELPELPELPPHLHTTNGLPPHLNGTLHKALKMSAPRFDEIVKELQPDLVLYDFLIPWAEKIAEKHGVPGVPLLTSGAAFFSYFFNFLKRPGHEFPFPAIRLSKREQDKMREMFGTEPTELDRLVPANAGIMLMCTSEVIEAPYLEYCQKLTNVEVVPVGAPFQDPLTEDIYDPELIAWLDTKPPGSVVYVSFGSEYFLSREQMHEVAEGLLESGVNFIWVARFPKGEEQPLEEVLPEGFLERIGDRGRVLDHLVPQAHILNHPATGGFISHCGWNSVMESIDFGVPIIAMPMQWDQPINARLLVELGVAVEIRRDEDGRIHREWIAETIREVIYGPTGETLRAQVAKIAAQLRAAREAEMDRAAERLLQLCLNRRALK

SEQ ID NO: 823 - protein, 440 aa, synthetic construct
QTPKILMFPWLGLGHVNPFLRIAKQLADRGFHIYLVSTAINLELAKKRIPEKYKDKITLVEYELPELPELPPHLHTTNGLPPHLNGTLHKALKMSAPRFDEIVKELQPDLVLYDFLIPWAEKIAEKHGVPGVPLLTSGAALFSYFFNFLKRPGHEFPFPAIRLSKREQDKMREAFGTEPTELDFLVPANAGIMLMCTSEVIEAPYLEYCQKLTNVEVVPVGAPFQDPLTEDIYDPELIAWLDTKPPGSVVYVSFGSEYFLSREQMHEVAEGLLESGVNFIWVARFPKGEEQPLEEVLPEGFLERIGDRGRVLDHLVPQAHILNHPATGGFISHCGWNSVMESIDFGVPIIAMPMQLDQPINARLLVELGVAVEIRRDEDGRIHREWIAETIREVIYGPTGETLRAQVAKIAAQLRAAREAEMDRAAERLLQLCLNRRALK

SEQ ID NO: 824 - protein, 440 aa, synthetic construct
QTPKILMFPWLALGHVNPFLRIAKQLADRGFHIYLVSTAINLELAKKRIPEKYKDKITLVEYELPELPELPPHLHTTNGLPPHLMGTLHKALKMSAPRFDEIVKELQPDLVLYDFMIPWAEKIAEKHGVPGVPLLTSGAALFSYFFNFLKRPGHEFPFPAIYLSKREQDKMREMFGTEPTELDFLVPANAGIMLMCTSEVIEAPYLEYCQKLTNVEVVPVGAPFQDPLTEDIYDPELIAWLDTKPPGSVVYVSFGSEYFLSREQMHEVAEGLLESGVNFIWVARFPKGEEQPLEEVLPEGFLERIGDRGRVLDHLVPQAHILNHPATGGFISHCGWNSVMESIDFGVPIIAMPMQWDQPINARLLVELGVAVEIRRDEDGRIHREWIAETIREVIYGPTGETLRAQVAKIAAQLRAAREAEMDRAAERLLQLCLNRRALK

SEQ ID NO: 825 - protein, 440 aa, synthetic construct
QTPKILMFPWLALGHVNPFLRIAKQLADRGFHIYLVSTAINLELAKKRIPEKYKDKITLVEYELPELPELPPHLHTTNGLPPHLNGTLHKALKMSAPRFDEIVKELQPDLVLYDFLIPWAEKIAEKHGVPGVPLLTSGAALFSYFFNFLKRPGHEFPFPAIRLSKREQDKMREAFGDEPTELDFLVPANAGIMLMCTSEVIEAPYLEYCQKLTNVEVVPVGAPFQDPLTEDIYDPELIAWLDTKPPGSVVYVSFGSEYFLSREQMHEVAEGLLESGVNFIWVARFPKGEEQPLEEVLPEGFLERIGDRGRVLDHLVPQAHILNHPATGGFISHCGWSSVMESIDFGVPIIAMPMQWDQPINARLLVELGVAVEIRRDEDGRIHREWIAETIREVIYGPTGETLRAQVAKIAAQLRAAREAEMDRAAERLLQLCLNRRALK

SEQ ID NO: 826 - protein, 440 aa, synthetic construct
QTPKILMFPWLALGHVNPFLRIAKQLADRGFHIYLVSTAINLELAKKRIPEKYKDKITLVEYELPELPELPPHLHTTNGLPPHLNGTLHKALKMSAPRFDEIVKELQPDLVLYDFVIPWAEKIAEKHGVPGVPLLTSGAALFSYFFNFLKRPGHEFPFPDIRLSKREQDKMREMFGTEPLELDFLVPANAGIMLMCTSEVIEAPYLEYCQKLTNVEVVPVGAPFQDPLTEDIYDPELIAWLDTKPPGSVVYVSFGSEYFLSREQMHEVAEGLLESGVNFIWVARFPKGEEQPLEEVLPEGFLERIGDRGRVLDHLVPQAHILNHPATGGFISHCGWNSVMESIDFGVPIIAMPMQWDQPINARLLVELGVAVEIRRDEDGRIHREWIAETIREVIYGPTGETLRAQVAKIAAQLRAAREAEMDRAAERLLQLCLNRRALK

SEQ ID NO: 827 - protein, 440 aa, synthetic construct
QTPKILMFPWLALGHVNPFLRIAKQLADRGFHIYLVSTAINLELAKKRIPEKYKDKITLVEYELPELPELPPHLHTTNGLPPHLNGTLHKALKMSAPRFDEIVKELQPDLVLYDFVIPWAEKIAEKHGVPGVPLLTSGAALFSYFFNFLKRPGHEFPFPGIRLSKREQDKMREMFGTAPTELDFLVPANAGIMLMCTSEVIEAPYLEYCQKLTNVEVVPVGAPFQDPLTEDIYDPELIAWLDTKPPGSVVYVSFGSEYFLSREQMHEVAEGLLESGVNFIWVARFPKGEEQPLEEVLPEGFLERIGDRGRVLDHLVPQAHILNHPATGGFISHCGWNSVMESIDFGVPIIAMPMQWDQPINARLLVELGVAVEIRRDEDGRIHREWIAETIREVIYGPTGETLRAQVAKIAAQLRAAREAEMDRAAERLLQLCLNRRALK

SEQ ID NO: 828 - protein, 440 aa, synthetic construct
QTPKILMFPWLALGHVNPFLRIAKQLADRGFHIYLVSTAINLELAKKRIPEKYKDKITLVEYELPELPELPPHLHTTNGLPPHLNGTLHKALKMSAPRFDEIVKELQPDLVLYDFVIPWAEKIAEKHGVPGVPLLTSGAALFSYFFNFLKRPGHEFPFPAIRLSKREQDKMREMFGDYPTELDFLVPANAGIMLMCTSEVIEAPYLEYCQKLTNVEVVPVGAPFQDPLTEDIYDPELIAWLDTKPPGSVVYVSFGSEYFLSREQMHEVAEGLLESGVNFIWVARFPKGEEQPLEEVLPEGFLERIGDRGRVLDHLVPQAHILNHPATGGFISHCGWNSVMESIDFGVPIIAMPMQWDQPINARLLVELGVAVEIRRDEDGRIHREWIAETIREVIYGPTGETLRAQVAKIAAQLRAAREAEMDRAAERLLQLCLNRRALK

SEQ ID NO: 829 - protein, 440 aa, synthetic construct
QTPKILMFPWLALGHVNPFLRIAKQLADRGFHIYLVSTAINLELAKKRIPEKYKDKITLVEYELPELPELPPHLHTTNGLPPHLNGTLHKALKMSAPRFDEIVKELQPDLVLYDFVIPWAEKIAEKHGVPGVPLLTSGAALFSYFFNFLKRPGHEFPFPAIYLSKREQDKMREMFGTEPTELDFLVPANAGIMLMCTSEVIEAPYLEYCQKLTNVEVVPVGAPFQDPLTEDIYDPELIAWLDTKPPGSVVYVSFGSEYFLSREQMHEVAEGLLESGVNFIWVARFPKGEEQPLEEVLPEGFLERIGDRGRVLDHLVPQAHILNHPATGGFISHCGWSSVMESIDFGVPIIAMPMQWDQPINARLLVELGVAVEIRRDEDGRIHREWIAETIREVIYGPTGETLRAQVAKIAAQLRAAREAEMDRAAERLLQLCLNRRALK

SEQ ID NO: 830 - protein, 440 aa, synthetic construct
QTPKILMFPWLALGHVNPFLRIAKQLADRGFHIYLVSTAINLELAKKRIPEKYKDKITLVEYELPELPELPPHLHTTNGLPPHLNGTLHKALKMSAPRFDEIVKELQPDLVLYDFLIPWAEKIAEKHGVPGVPLLTSGAALFSYFFNFLKRPGHEFPFPAIRLSKREQDKMREMFETEPTEFDFLVPANAGIMLMCTSEVIEAPYLEYCQKLTNVEVVPVGAPFQDPLTEDIYDPELIAWLDTKPPGSVVYVSFGSEYFLSREQMHEVAEGLLESGVNFIWVARFPKGEEQPLEEVLPEGFLERIGDRGRVLDHLVPQAHILNHPATGGFISHCGWSSVMESIDFGVPIIAMPMQWDQPINARLLVELGVAVEIRRDEDGRIHREWIAETIREVIYGPTGETLRAQVAKIAAQLRAAREAEMDRAAERLLQLCLNRRALK

SEQ ID NO: 831 - protein, 440 aa, synthetic construct
QTPKILMFPWLALGHVNPFLRIAKQLADRGFHIYLVSTAINLELAKKRIPEKYKDKITLVEYELPELPELPPHLHTTNGLPPHLMGTLHKALKMSAPRFDEIVKELQPDLVLYDFVIPWAEKIAEKHGVPGVPLLTSGAALFSYFFNFLKRPGHEFPFPAIRLSKREQDKMREMFETEPTELDFLVPANAGIMLMCTSEVIEAPYLEYCQKLTNVEVVPVGAPFQDPLTEDIYDPELIAWLDTKPPGSVVYVSFGSEYFLSREQMHEVAEGLLESGVNFIWVARFPKGEEQPLEEVLPEGFLERIGDRGRVLDHLVPQAHILNHPATGGFISHCGWNSVMESIDFGVPIIAMPMQWDQPINARLLVELGVAVEIRRDEDGRIHREWIAETIREVIYGPTGETLRAQVAKIAAQLRAAREAEMDRAAERLLQLCLNRRALK

SEQ ID NO: 832 - protein, 440 aa, synthetic construct
QTPKILMFPWLALGHVNPFLRIAKQLADRGFHIYLVSTAINLELAKKRIPEKYKDKITLVEYELPELPELPPHLHTTNGLPPHLNGTLHKALKMSAPRFDEIVKELQPDLVLYDFLIPWAEKIAEKHGVPGVPLLTFGAAVLSYFFNFLKRPGHEFPFPAIRLSKREQDKMREMFGTEPTELDFLVPANAGIMLMCTSEVIEAPYLEYCQKLTNVEVVPVGAPFQDPLTEDIYDPELIAWLDTKPPGSVVYVSFGSEYFLSREQMHEVAEGLLESGVNFIWVARFPKGEEQPLEEVLPEGFLERIGDRGRVLDHLVPQAHILNHPATGGFISHCGWNSVMESIDFGVPIIAMPMQWDQPINARLLVELGVAVEIRRDEDGRIHREWIAETIREVIYGPTGETLRAQVAKIAAQLRAAREAEMDRAAERLLQLCLNRRALK

SEQ ID NO: 833 - protein, 440 aa, synthetic construct
QTPKILMFPWLALGHVNPFLRIAKQLADRGFHIYLVSTAINLELAKKRIPEKYKDKITLVEYELPELPELPPHLHTTNGLPPHLNGTLHKALKMSAPRFDEIVKELQPDLVLYDFLIPWAEKIAEKHGVPGVPLHNIGAALFSYFFNFLKRPGHEFPFPAIRLSKREQDKMREMFGTEPTELDFLVPANAGIMLMCTSEVIEAPYLEYCQKLTNVEVVPVGAPFQDPLTEDIYDPELIAWLDTKPPGSVVYVSFGSEYFLSREQMHEVAEGLLESGVNFIWVARFPKGEEQPLEEVLPEGFLERIGDRGRVLDHLVPQAHILNHPATGGFISHCGWNSVMESIDFGVPIIAMPMQWDQPINARLLVELGVAVEIRRDEDGRIHREWIAETIREVIYGPTGETLRAQVAKIAAQLRAAREAEMDRAAERLLQLCLNRRALK

SEQ ID NO: 834 - protein, 440 aa, synthetic construct
QTPKILMFPWLSLGHVNPFLRIAKQLADRGFHIYLVSTAINLELAKKRIPEKYKDKITLVEYELPELPELPPHLHTTNGLPPHLNGTLHKALKMSAPRFDEIVKELQPDLVLYDFLIPWAEKIAEKHGVPGVPLLTSGAALFSYFFNFLKRPGHEFPFPAIRLSKREQDKMREMFGTEPTELDFLVPANAGIMLMCTSEVIEAPYLEYCQKLTNVEVVPVGAPFQDPLTEDIYDPELIAWLDTKPPGSVVFVDFGSEYFLSREQMHEVAEGLLESGVNFIWVARFPKGEEQPLEEVLPEGFLERIGDRGRVLDHLVPIAHILNHPATGGFISHCGWNSVMESIDFGVPIIAMPMQWDQPINARLLVELGVAVEIRRDEDGRIHREWIAETIREVIYGPTGETLRAQVAKIAAQLRAAREAEMDRAAERLLQLCLNRRALK

SEQ ID NO: 835 - protein, 440 aa, synthetic construct
QTPKILMFPYLALGHVNPFLRIAKQLADRGFHIYLVSTAINLELAKKRIPEKYKDKITLVEYELPELPELPPHLHTTNGLPPHLNGTLHKALKMSAPRFDEIVKELQPDLVLYDFLIPWAEKIAEKHGVPGVPLLTSGAALFSYFFNFLKRPGHEFPFPAIRLSKREQDKMREMFGTEPTELDFLVPANAGIMLMCTSEVIEAPYLEYCQKLTNVEVVPVGAPFQDPLTEDIYDPELIAWLDTKPPGSVVYVDFGSEYFLSREQMHEVAEGLLESGVNFIWVARFPKGEEQPLEEVLPEGFLERIGDRGRVLDHLVPKAHILNHPATGGFISHCGWNSVMESIDFGVPIIAMPMQWDQPINARLLVELGVAVEIRRDEDGRIHREWIAETIREVIYGPTGETLRAQVAKIAAQLRAAREAEMDRAAERLLQLCLNRRALK

SEQ ID NO: 836 - protein, 440 aa, synthetic construct
QTPKILMFPYLGLGHVEPFLRIAKQLADRGFHIYLVSTAINLELAKKRIPEKYKDKITLVEYELPELPELPPHLHTTNGLPPHLNGTLHKALKMSAPRFDEIVKELQPDLVLYDFLIPWAEKIAEKHGVPGVPLLTSGAALFSYFFNFLKRPGHEFPFPAIRLSKREQDKMREMFGTEPTELDFLVPANAGIMLMCTSEVIEAPYLEYCQKLTNVEVVPVGAPFQDPLTEDIYDPELIAWLDTKPPGSVVYVSFGSEYFLSREQMHEVAEGLLESGVNFIWVARFPKGEEQPLEEVLPEGFLERIGDRGRVLDHLVPQAHILNHPATGGIISHCGWNSVMESIDFGVPIIAMPMQWDQPINARLLVELGVAVEIRRDEDGRIHREWIAETIREVIYGPTGETLRAQVAKIAAQLRAAREAEMDRAAERLLQLCLNRRALK

SEQ ID NO: 837 - protein, 440 aa, synthetic construct
QTPKILMFPWLALGHVNPFLRIAKQLADRGFHIYLVSTAINLELAKKLIPEKYKDKITLVEYELPELPELPPHLHTTNGLPPHLNGTLHKALKMSAPRFDEIVKELQPDLVLYDFLIPWAEKIAEKHGVPGVPLLTSGAALFSYFFNFLKRPGHEFPFPAIRLSKREQDKMREMFGTEPTELDFLVPANAGIMLMCTSEVIEAPYLEYCQKLTNVEVVPVGAPFRDPLTEDVYDPELIAWLDTKPPGSVVYVSFGSEYFLSREQMHEVAEGLLESGVNFIWVARFPKGEEQPLEEVLPEGFLERIGDRGRVLDHLVPQAHILNHPATGGFISHCGWNSVMESIDFGVPIIAMPMQWDQPINARLLVELGVAVEIRRDEDGRIHREWIAETIREVIYGPTGETLRAQVAKIAAQLRAAREAEMDRAAERLLQLCLNRRALK

SEQ ID NO: 838 - protein, 440 aa, synthetic construct
QTPKILMFPWLALGHVNPFLRIAKQLADRGFHIYLVSTAINLELAKKRIPEKYKDKITLVEYELPELPELPPHLHTTNGLPPHLNGTLHKALKMSAPRFDEIVKELQPDLVLYDFLIPWAEKIAEKHGVPGVPLSTVGAAVYSYFFNFLKRPGHEFPFPAIRLSKREQDKMREMFGTEPTELDFLVPANAGIMLMCTSEVIEAPYLEYCQKLTNVEVVPVGAPFQDPLTEDIYDPELIAWLDTKPPGSVVYVSFGSEYFLSREQMHEVAEGLLESGVNFIWVARFPKGEEQPLEEVLPEGFLERIGDRGRVLDHLVPQAHILNHPATGGFISHCGWNSVMESIDFGVPIIAMPMQWDQPINARLLVELGVAVEIRRDEDGRIHREWIAETIREVIYGPTGETLRAQVAKIAAQLRAAREAEMDRAAERLLQLCLNRRALK

SEQ ID NO: 839 - protein, 440 aa, synthetic construct
QTPKILMFPWLALGHVNPFLRIAKQLADRGFHIYLVSTAINLELAKKRIPEKYKDKITLVEYELPELPELPPHLHTTNGLPPHLNGTLHKALKMSAPRFDEIVKELQPDLVLYDFLIPWAEKIAEKHGVPGVPLLITGAATWSYFFNFLKRPGHEFPFPAIRLSKREQDKMREMFGTEPTELDFLVPANAGIMLMCTSEVIEAPYLEYCQKLTNVEVVPVGAPFQDPLTEDIYDPELIAWLDTKPPGSVVYVSFGSEYFLSREQMHEVAEGLLESGVNFIWVARFPKGEEQPLEEVLPEGFLERIGDRGRVLDHLVPQAHILNHPATGGFISHCGWNSVMESIDFGVPIIAMPMQWDQPINARLLVELGVAVEIRRDEDGRIHREWIAETIREVIYGPTGETLRAQVAKIAAQLRAAREAEMDRAAERLLQLCLNRRALK

SEQ ID NO: 840 - protein, 440 aa, synthetic construct
QTPKILMFPWLALGHVNPFLRIAKQLADRGFHIYLVSTAINLELAKKRIPEKYKDKITLVEYELPELPELPPHLHTTNGLPPHLNGTLEKALKMSAPRFDEIVKELQPDLVLYDFLIPWAEKIAEKHGVPGVPLLIVGAALVSYFFNFLKRPGHEFPFPAIRLSKREQDKMREMFGTEPTELDFLVPANAGIMLMCTSEVIEAPYLEYCQKLTNVEVVPVGAPFQDPLTEDIYDPELIAWLDTKPPGSVVYVSFGSEYFLSREQMHEVAEGLLESGVNFIWVARFPKGEEQPLEEVLPEGFLERIGDRGRVLDHLVPQAHILNHPATGGFISHCGWNSVMESIDFGVPIIAMPMQWDQPINARLLVELGVAVEIRRDEDGRIHREWIAETIREVIYGPTGETLRAQVAKIAAQLRAAREAEMDRAAERLLQLCLNRRALK

SEQ ID NO: 841 - protein, 440 aa, synthetic construct
QTPKILMFPWLALGHVEPFLRIAKQLADRGFHIYLVSTAINLELAKKRIPEKYKDKITLVEYELPELPELPPHLHTTNGLPPHLNGTLHKALKMSAPRFDEIVKELQPDLVLYDFLIPWAEKIAEKHGVPGVPLFVVGAALFSYFFNFLKRPGHEFPFPAIRLSKREQDKMREMFGTEPTELDFLVPANAGIMLMCTSEVIEAPYLEYCQKLTNVEVVPVGAPFQDPLTEDIYDPELIAWLDTKPPGSVVYVSFGSEYFLSREQMHEVAEGLLESGVNFIWVARFPKGEEQPLEEVLPEGFLERIGDRGRVLDHLVPQAHILNHPATGGFISHCGWNSVMESIDFGVPIIAMPMQWDQPINARLLVELGVAVEIRRDEDGRIHREWIAETIREVIYGPTGETLRAQVAKIAAQLRAAREAEMDRAAERLLQLCLNRRALK

SEQ ID NO: 842 - protein, 440 aa, synthetic construct
QTPKILMFPWLALGHVNPFLRIAKQLADRGFHIYLVSTAINLELAKKRIPEKYKDKITLVEYELPELPELPPHLHTTNGLPPHLNGTLEKALKMSAPRFDEIVKELQPDLVLYDFLIPWAEKIAEKHGVPGVPLLVTGAALTSYFFNFLKRPGHEFPFPAIRLSKREQDKMREMFGTEPTELDFLVPANAGIMLMCTSEVIEAPYLEYCQKLTNVEVVPVGAPFQDPLTEDIYDPELIAWLDTKPPGSVVYVSFGSEYFLSREQMHEVAEGLLESGVNFIWVARFPKGEEQPLEEVLPEGFLERIGDRGRVLDHLVPQAHILNHPATGGFISHCGWNSVMESIDFGVPIIAMPMQWDQPINARLLVELGVAVEIRRDEDGRIHREWIAETIREVIYGPTGETLRAQVAKIAAQLRAAREAEMDRAAERLLQLCLNRRALK

SEQ ID NO: 843 - protein, 440 aa, synthetic construct
QTPKILMFPWLAIGHVEPFLRIAKQLADRGFHIYLVSTAINLELAKKRIPEKYKDKITLVEYELPELPELPPHLHTTNGLPPHLNGTLHKALKMSAPRFDEIVKELQPDLVLYDFLIPWAEKIAEKHGVPGVPLLTSGAALFSYFFNFLKRPGHEFPFPAIRLSKREQDKMREMFGTEPTELDFLVPANAGIMLMCTSEVIEAPYLEYCQKLTNVEVVPVGAPFQDPLTEDFYDPELIAWLDTKPPGSVVVVSFGSEYFLSREQMHEVAEGLLESGVNFIWVARFPKGEEQPLEEVLPEGFLERIGDRGRVLDHLVPQAHILNHPATGGFISHCGWNSVMESIDFGVPIIAMPMQWDQPINARLLVELGVAVEIRRDEDGRIHREWIAETIREVIYGPTGETLRAQVAKIAAQLRAAREAEMDRAAERLLQLCLNRRALK

SEQ ID NO: 844 - protein, 440 aa, synthetic construct
QTPKILMFPWLAGGHVNPFLRIAKQLADRGFHIYLVSTAINLELAKKRIPEKYKDKITLVEYELPELPELPPHLHTTNGLPPHLNGTLHKALKMSAPRFDEIVKELQPDLVLYDFLIPWAEKIAEKHGVPGVPLLTSGAALFSYFFNFLKRPGHEFPFPAIRLSKREQDKMREMFGTEPTELDFLVPANAGIMLMCTSEVIEAPYLEYCQKLTNVEVVPVGAPFMDPLTEDLYDPELIAWLDTKPPGSVVLVSFGSEYFLSREQMHEVAEGLLESGVNFIWVARFPKGEEQPLEEVLPEGFLERIGDRGRVLDHLVPQAHILNHPATGGFISHCGWNSVMESIDFGVPIIAMPMQWDQPINARLLVELGVAVEIRRDEDGRIHREWIAETIREVIYGPTGETLRAQVAKIAAQLRAAREAEMDRAAERLLQLCLNRRALK

SEQ ID NO: 845 - protein, 440 aa, synthetic construct
QTPKILMFPWLALGHVLPFLRIAKQLADRGFHIYLVSTAINLELAKKRIPEKYKDKITLVEYELPELPELPPHLHTTNGLPPHLNGTLHKALKMSAPRFDEIVKELQPDLVLYDFLIPWAEKIAEKHGVPGVPLLTSGAALFSYFFNFLKRPGHEFPFPAIRLSKREQDKMREMFGTEPTELDFLVPANAGIMLMCTSEVIEAPYLEYCQKLTNVEVVPVGAPFIDPLTEDVYDPELIAWLDTKPPGSVVVVSFGSEYFLSREQMHEVAEGLLESGVNFIWVARFPKGEEQPLEEVLPEGFLERIGDRGRVLDHLVPQAHILNHPATGGFISHCGWNSVMESIDFGVPIIAMPMQWDQPINARLLVELGVAVEIRRDEDGRIHREWIAETIREVIYGPTGETLRAQVAKIAAQLRAAREAEMDRAAERLLQLCLNRRALK

SEQ ID NO: 846 - protein, 440 aa, synthetic construct
QTPKILMFPWLAGGHVTPFLRIAKQLADRGFHIYLVSTAINLELAKKRIPEKYKDKITLVEYELPELPELPPHLHTTNGLPPHLNGTLHKALKMSAPRFDEIVKELQPDLVLYDFLIPWAEKIAEKHGVPGVPLLTSGAALFSYFFNFLKRPGHEFPFPAIRLSKREQDKMREMFGTEPTELDFLVPANAGIMLMCTSEVIEAPYLEYCQKLTNVEVVPVGAPFYDPLTEDIYDPELIAWLDTKPPGSVVVVSFGSEYFLSREQMHEVAEGLLESGVNFIWVARFPKGEEQPLEEVLPEGFLERIGDRGRVLDHLVPQAHILNHPATGGFISHCGWNSVMESIDFGVPIIAMPMQWDQPINARLLVELGVAVEIRRDEDGRIHREWIAETIREVIYGPTGETLRAQVAKIAAQLRAAREAEMDRAAERLLQLCLNRRALK

SEQ ID NO: 847 - protein, 440 aa, synthetic construct
QTPKILMFPWLALGHVNPFLRIAKQLADRGFHIYLVSTAINLELAKKRIPEKYKDKITLVEYELPELPELPPHLHTTNGLPPHLNGTLHKALKMSAPRFDEIVKELQPDLVLYDFLIPWAEKIAEKHGVPGVPLLTIGAAVISYFFNFLKRPGHEFPFPAIRLSKREQDKMREMFGTEPTELDFLVPANAGIMLMCTSEVIEAPYLEYCQKLTNVEVVPVGAPFQDPLTEDIYDPELIAWLDTKPPGSVVFVSFGSEYFLSREQMHEVAEGLLESGVNFIWVARFPKGEEQPLEEVLPEGFLERIGDRGRVLDHLVPQAHILNHPATGGFISHCGWNSVMESIDFGVPIIAMPMQWDQPINARLLVELGVAVEIRRDEDGRIHREWIAETIREVIYGPTGETLRAQVAKIAAQLRAAREAEMDRAAERLLQLCLNRRALK

SEQ ID NO: 848 - protein, 440 aa, synthetic construct
QTPKILMFPWLALGHVNPFLRIAKQLADRGFHIYLVSTAINLELAKKRIPEKYKDKITLVEYELPELPELPPHLHTTNGLPPHLNGTLHKALKMSAPRFDEIVKELQPDLVLYDFLIPWAEKIAEKHGVPGVPLLTSGAALWSYAVNFLKRPGHEFPFPAIRLSKREQDKMREMFGTEPTELDFLVPANAGIMLMCTSEVIEAPYLEYCQKLTNVEVVPVGAPFQDPLTEDIYDPELIAWLDTKPPGSVVYVSFGSEYFLSREQMHEVAEGLLESGVNFIWVARFPKGEEQPLEEVLPEGFLERIGDRGRVLDHLVPQAHILNHPATGGFISHCGWNSVMESIDFGVPIIAMPMQLDQPINARLLVELGVAVEIRRDEDGRIHREWIAETIREVIYGPTGETLRAQVAKIAAQLRAAREAEMDRAAERLLQLCLNRRALK

SEQ ID NO: 849 - protein, 440 aa, synthetic construct
QTPKILMFPWLALGHVNPFLRIAKQLADRGFHIYLVSTAINLELAKKRIPEKYKDKITLVEYELPELPELPPHLHTTNGLPPHLIGTLHKALKMSAPRFDEIVKELQPDLVLYDFLIPWAEKIAEKHGVPGVPLLTSGAALWSYYRNFLKRPGHEFPFPAIRLSKREQDKMREMFGTEPTELDFLVPANAGIMLMCTSEVIEAPYLEYCQKLTNVEVVPVGAPFQDPLTEDIYDPELIAWLDTKPPGSVVYVSFGSEYFLSREQMHEVAEGLLESGVNFIWVARFPKGEEQPLEEVLPEGFLERIGDRGRVLDHLVPQAHILNHPATGGFISHCGWNSVMESIDFGVPIIAMPMQWDQPINARLLVELGVAVEIRRDEDGRIHREWIAETIREVIYGPTGETLRAQVAKIAAQLRAAREAEMDRAAERLLQLCLNRRALK

SEQ ID NO: 850 - protein, 440 aa, synthetic construct
QTPKILMFPWLALGHVNPFLRIAKQLADRGFHIYLVSTAINLELAKKRIPEKYKDKITLVEYELPELPELPPHLHTTNGLPPHLNGTLHKALKMSAPRFDEIVKELQPDLVLYDILIPWAEKIAEKHGVPGVPLVTVGAALFSYIFNFLKRPGHEFPFPAIRLSKREQDKMREMFGTEPTELDFLVPANAGIMLMCTSEVIEAPYLEYCQKLTNVEVVPVGAPFQDPLTEDIYDPELIAWLDTKPPGSVVYVSFGSEYFLSREQMHEVAEGLLESGVNFIWVARFPKGEEQPLEEVLPEGFLERIGDRGRVLDHLVPQAHILNHPATGGFISHCGWNSVMESIDFGVPIIAMPMQWDQPINARLLVELGVAVEIRRDEDGRIHREWIAETIREVIYGPTGETLRAQVAKIAAQLRAAREAEMDRAAERLLQLCLNRRALK

SEQ ID NO: 851 - protein, 440 aa, synthetic construct
QTPKILMFPWLALGHVNPFLRIAKQLADRGFHIYLVSTAINLELAKKRIPEKYKDKITLVEYELPELPELPPHLHTTNGLPPHLFGTLHKALKMSAPRFDEIVKELQPDLVLYDFLIPWAEKIAEKHGVPGVPLLTTGAALFSYYFNFLKRPGHEFPFPAIRLSKREQDKMREMFGTEPTELDFLVPANAGIMLMCTSEVIEAPYLEYCQKLTNVEVVPVGAPFQDPLTEDIYDPELIAWLDTKPPGSVVYVSFGSEYFLSREQMHEVAEGLLESGVNFIWVARFPKGEEQPLEEVLPEGFLERIGDRGRVLDHLVPQAHILNHPATGGFISHCGWNSVMESIDFGVPIIAMPMQGDQPINARLLVELGVAVEIRRDEDGRIHREWIAETIREVIYGPTGETLRAQVAKIAAQLRAAREAEMDRAAERLLQLCLNRRALK

SEQ ID NO: 852 - protein, 440 aa, synthetic construct
QTPKILMFPWLALGHVNPFLRIAKQLADRGFHIYLVSTAINLELAKKRIPEKYKDKITLVEYELPELPELPPHLHTTNGLPPHLIGTLHKALKMSAPRFDEIVKELQPDLVLYDVLIPWAEKIAEKHGVPGVPLLTVGAALFSYFFNFLKRPGHEFPFPAIRLSKREQDKMREMFGTEPTELDFLVPANAGIMLMCTSEVIEAPYLEYCQKLTNVEVVPVGAPFQDPLTEDIYDPELIAWLDTKPPGSVVYVSFGSEYFLSREQMHEVAEGLLESGVNFIWVARFPKGEEQPLEEVLPEGFLERIGDRGRVLDHLVPQAHILNHPATGGFISHCGWNSVMESIDFGVPIIAMPMQADQPINARLLVELGVAVEIRRDEDGRIHREWIAETIREVIYGPTGETLRAQVAKIAAQLRAAREAEMDRAAERLLQLCLNRRALK

SEQ ID NO: 853 - protein, 440 aa, synthetic construct
QTPKILMFPWLALGHVNPFLRIAKQLADRGFHIYLVSTAINLELAKKRIPEKYKDKITLVEYELPELPELPPHLHTTNGLPPHLNGTLHKALKMSAPRFDEIVKELQPDLVLYDALIPWAEKIAEKHGVPGVPLLTAGAATFSYWFNFLKRPGHEFPFPAIRLSKREQDKMREMFGTEPTELDFLVPANAGIMLMCTSEVIEAPYLEYCQKLTNVEVVPVGAPFQDPLTEDIYDPELIAWLDTKPPGSVVYVSFGSEYFLSREQMHEVAEGLLESGVNFIWVARFPKGEEQPLEEVLPEGFLERIGDRGRVLDHLVPQAHILNHPATGGFISHCGWNSVMESIDFGVPIIAMPMQRDQPINARLLVELGVAVEIRRDEDGRIHREWIAETIREVIYGPTGETLRAQVAKIAAQLRAAREAEMDRAAERLLQLCLNRRALK

SEQ ID NO: 854 - protein, 440 aa, synthetic construct
QTPKILMFPWLALGHVNPFLRIAKQLADRGFHIYLVSTAINLELAKKRIPEKYKDKITLVEYELPELPELPPHLHTTNGLPPHLNGTLHKALKMSAPRFDEIVKELQPDLVLYDVLIPWAEKIAEKHGVPGVPLLTIGAALLSYMFNFLKRPGHEFPFPAIRLSKREQDKMREMFGTEPTELDFLVPANAGIMLMCTSEVIEAPYLEYCQKLTNVEVVPVGAPFQDPLTEDIYDPELIAWLDTKPPGSVVYVSFGSEYFLSREQMHEVAEGLLESGVNFIWVARFPKGEEQPLEEVLPEGFLERIGDRGRVLDHLVPQAHILNHPATGGFISHCGWNSVMESIDFGVPIIAMPMQGDQPINARLLVELGVAVEIRRDEDGRIHREWIAETIREVIYGPTGETLRAQVAKIAAQLRAAREAEMDRAAERLLQLCLNRRALK

SEQ ID NO: 855 - protein, 440 aa, synthetic construct
QTPKILMFPWLALGHVNPFLRIAKQLADRGFHIYLVSTAINLELAKKRIPEKYKDKITLVEYELPELPELPPHLHTTNGLPPHLFGTLHKALKMSAPRFDEIVKELQPDLVLYDFLIPWAEKIAEKHGVPGVPLLTIGAALFSYLFNFLKRPGHEFPFPAIRLSKREQDKMREMFGTEPTELDFLVPANAGIMLMCTSEVIEAPYLEYCQKLTNVEVVPVGAPFQDPLTEDIYDPELIAWLDTKPPGSVVYVSFGSEYFLSREQMHEVAEGLLESGVNFIWVARFPKGEEQPLEEVLPEGFLERIGDRGRVLDHLVPQAHILNHPATGGFISHCGWNSVMESIDFGVPIIAMPMQLDQPINARLLVELGVAVEIRRDEDGRIHREWIAETIREVIYGPTGETLRAQVAKIAAQLRAAREAEMDRAAERLLQLCLNRRALK

SEQ ID NO: 856 - protein, 440 aa, synthetic construct
QTPKILMFPWLALGHVNPFLRIAKQLADRGFHIYLVSTAINLELAKKRIPEKYKDKITLVEYELPELPELPPHLHTTNGLPPHLIGTLHKALKMSAPRFDEIVKELQPDLVLYDILIPWAEKIAEKHGVPGVPLSTFGAALFSYLFNFLKRPGHEFPFPAIRLSKREQDKMREMFGTEPTELDFLVPANAGIMLMCTSEVIEAPYLEYCQKLTNVEVVPVGAPFQDPLTEDIYDPELIAWLDTKPPGSVVYVSFGSEYFLSREQMHEVAEGLLESGVNFIWVARFPKGEEQPLEEVLPEGFLERIGDRGRVLDHLVPQAHILNHPATGGFISHCGWNSVMESIDFGVPIIAMPMQWDQPINARLLVELGVAVEIRRDEDGRIHREWIAETIREVIYGPTGETLRAQVAKIAAQLRAAREAEMDRAAERLLQLCLNRRALK

SEQ ID NO: 857 - protein, 440 aa, synthetic construct
QTPKILMFPWLATGHVNPFLRIAKQLADRGFHIYLVSTAINLELAKKRIPEKYKDKITLVEYELPELPELPPHLHTTNGLPPHLNGTLHKALKMSAPRFDEIVKELQPDLVLYDFLIPWAEKIAEKHGVPGVPLLTSGAALFSYFFNFLKRPGHEFPFPAIRLSKREQDKMREMFGTEPTELDFLVPANAGIMLMCTSEVIEAPYLEYCQKLTNVEVVPVGAPFLDPLTEDYYDPELIAWLDTKPPGSVVVVSFGSEYFLSREQMHEVAEGLLESGVNFIWVARFPKGEEQPLEEVLPEGFLERIGDRGRVLDHLVPQAHILNHPATGGFISHCGWNSVMESIDFGVPIIAMPMQWDQPINARLLVELGVAVEIRRDEDGRIHREWIAETIREVIYGPTGETLRAQVAKIAAQLRAAREAEMDRAAERLLQLCLNRRALK

SEQ ID NO: 858 - protein, 440 aa, synthetic construct
QTPKILMFPWLAGGHVDPFLRIAKQLADRGFHIYLVSTAINLELAKKRIPEKYKDKITLVEYELPELPELPPHLHTTNGLPPHLNGTLHKALKMSAPRFDEIVKELQPDLVLYDFLIPWAEKIAEKHGVPGVPLLTSGAALFSYFFNFLKRPGHEFPFPAIRLSKREQDKMREMFGTEPTELDFLVPANAGIMLMCTSEVIEAPYLEYCQKLTNVEVVPVGAPFIDPLTEDIYDPELIAWLDTKPPGSVVFVSFGSEYFLSREQMHEVAEGLLESGVNFIWVARFPKGEEQPLEEVLPEGFLERIGDRGRVLDHLVPQAHILNHPATGGFISHCGWNSVMESIDFGVPIIAMPMQWDQPINARLLVELGVAVEIRRDEDGRIHREWIAETIREVIYGPTGETLRAQVAKIAAQLRAAREAEMDRAAERLLQLCLNRRALK

SEQ ID NO: 859 - protein, 440 aa, synthetic construct
QTPKILMFPWLALGHVKPFLRIAKQLADRGFHIYLVSTAINLELAKKEIPEKYKDKITLVEYELPELPELPPHLHTTNGLPPHLNGTLHKALKMSAPRFDEIVKELQPDLVLYDFLIPWAEKIAEKHGVPGVPLLTSGAALFSYFFNFLKRPGHEFPFPAIRLSKREQDKMREMFGTEPTELDFLVPANAGIMLMCTSEVIEAPYLEYCQKLTNVEVVPVGAPFQDPLTEDTYDPELIAWLDTKPPGSVVYVSFGSEYFLSREQMHEVAEGLLESGVNFIWVARFPKGEEQPLEEVLPEGFLERIGDRGRVLDHLVPQAHILNHPATGGFISHCGWNSVMESIDFGVPIIAMPMQWDQPINARLLVELGVAVEIRRDEDGRIHREWIAETIREVIYGPTGETLRAQVAKIAAQLRAAREAEMDRAAERLLQLCLNRRALK

SEQ ID NO: 860 - protein, 440 aa, synthetic construct
QTPKILMFPWLALGHVNPFLRIAKQLADRGFHIYLVSTAINLELAKKRIPEKYKDKITLVEYELPELPELPPHLHTTNGLPPHLNGTLHKALKMSAPRFDEIVKELQPDLVLYDFLIPWAEKIAEKHGVPGVPLLTSGAALFSYFFNFLKRPGHEFPFPAIRLSKREQDKMREMFGTEPTELDFLVPANAGIMLMCTSEVIEAPYLEYCQKLTNVEVVPVGAPFQDPLTEDIYDPELMAWLDTKPPGSVVYVSFGSEYFLSREQMHEVAEGLLESGVNFIWVLRFPKGEEQPLEEVLPEGFLERIGDRGRVFDHLVPQAEILNHPATGGFISHCGWNSVMESVYYGVPIIAMPMQWDQPINARLLVELGVAVEIRRDEDGRIHREWIAETIREVIYGPTGETLRAQVAKIAAQLRAAREAEMDRAAERLLQLCLNRRALK

SEQ ID NO: 861 - protein, 440 aa, synthetic construct
QTPKILMFPWLALGHVNPFLRIAKQLADRGFHIYLVSTAINLELAKKRIPEKYKDKITLVEYELPELPELPPHLHTTNGLPPHLNGTLHKALKMSAPRFDEIVKELQPDLVLYDFLIPWAEKIAEKHGVPGVPLLTSGAALFSYFFNFLKRPGHEFPFPAIRLSKREQDKMREMFGTEPTELDFLVPANAGIMLMCTSEVIEAPYLEYCQKLTNVEVVPVGAPFQDPLTEDIYDPEVLAWLDTKPPGSVVYVSFGSEYFLSREQVHEVAEGLLESGVNFIWVLRFPKGEEQPLEEVLPEGFLERIGDRGRVLDHLVPQELILNHPATGGFISHCGWNSVMESIQHGVPIIAMPMQWDQPINARLLVELGVAVEIRRDEDGRIHREWIAETIREVIYGPTGETLRAQVAKIAAQLRAAREAEMDRAAERLLQLCLNRRALK

SEQ ID NO: 862 - protein, 440 aa, synthetic construct
QTPKILMFPWLALGHVNPFLRIAKQLADRGFHIYLVSTAINLELAKKEIPEKYKDKITLVEYELPELPELPPHLHTTNGLPPHLNGTLHKALKMSAPRFDEIVKELQPDLVLYDFLIPWAEKIAEKHGVPGVPLLTSGAALFSYFFNFLKRPGHEFPFPAIRLSKREQDKMREMFGTEPTELDFLVPANAGIMLMCTSEVIEAPYLEYCQKLTNVEVVPVGAPFKDPLRESIMDPELIAWLDTKPPGSVVYVSFGSEYFLSREQMHEVAEGLLESGVNFIWVARFPKGEEQPLEEVLPEGFLERIGDRGRVLDHLVPQDHILNHPATGGFISHCGWNSVMESIQFGVPIIAMPMQWDQPINARLLVELGVAVEIRRDEDGRIHREWIAETIREVIYGPTGETLRAQVAKIAAQLRAAQEAEMDRAAERLLQLCLNRRALK

SEQ ID NO: 863 - protein, 440 aa, synthetic construct
QTPKILMFPWLALGHVNPFLRIAKQLADRGFHIYLVSTAINLELAKKRIPEKYKDKITLVEYELPELPELPPHLHTTNGLPPHLNGTLLKALKMSAPRFDEIVKELQPDLVLYDFLIPWAEKIAEKHGVPGVPLLVVGAQLFSEFFNFLKRPGHEFPFPAIRLSKREQDKMREMFGTEPTELDFLVPANAGILLMCTSEVLEAPYLEYCQKLTNVEVVPVGAPFQDPLTEDIYDPELIAWLDTKPPGSVVYVSFGSEYFLSREQMHEVAEGLLESGVNFIWVARFPKGEEQPLEEVLPEGFLERIGDRGRVLDHLVPQAHILNHPATGGFISHCGWNSVMESIDFGVPIIAMPMQWDQPQNARLLVELGVAVEIRRDEDGRIHREWIAETIREVIYGPTGETLRAQVAKIAAQLRAAREAEMDRAAERLLQLCLNRRALK

SEQ ID NO: 864 - protein, 440 aa, synthetic construct
QTPKILMFPWLALGHVNPFLRIAKQLADRGFHIYLVSTAINLELAKKRIPEKYKDKITLVEYELPELPELPPHLHTTNGLPPHLNGTLEKALKMSAPRFDEIVKELQPDLVLYDFLIPWAEKIAEKHGVPGVPLFTTGAATLSYFFNFLKRPGHEFPFPAIRLSKREQDKMREMFGTEPTELDFLVPANAGIALICTSEVIEAPYLEYCQKLTNVEVVPVGAPFQDPLTEDIYDPELIAWLDTKPPGSVVYVSFGSEYFLSREQMHEVAEGLLESGVNFIWVARFPKGEEQPLEEVLPEGFLERIGDRGRVLDHLVPQAHILNHPATGGFISHCGWNSVLESIDFGVPIIAMPMQWDQPINARLLVELGVAVEIRRDEDGRIHREWIAETIREVIYGPTGETLRAQVAKIAAQLRAAREAEMDRAAERLLQLCLNRRALK

SEQ ID NO: 865 - protein, 440 aa, synthetic construct
QTPKILMFPWLALGHVNPFLRIAKQLADRGFHIYLVSTAINLELAKKRIPEKYKDKITLVEYELPELPELPPHLHTTNGLPPHLNGTLEKALKMSAPRFDEIVKELQPDLVLYDFLIPWAEKIAEKHGVPGVPLLTIGAITFSEFFNFLKRPGHEFPFPAIRLSKREQDKMREMFGTEPTELDFLVPANAGIYLMCTSEVMEAPYLEYCQKLTNVEVVPVGAPFQDPLTEDIYDPELIAWLDTKPPGSVVYVSFGSEYFLSREQMHEVAEGLLESGVNFIWVARFPKGEEQPLEEVLPEGFLERIGDRGRVLDHLVPQAHILNHPATGGFISHCGWNSVMESIDFGVPIIAMPMQWDQPYNARLLVELGVAVEIRRDEDGRIHREWIAETIREVIYGPTGETLRAQVAKIAAQLRAAREAEMDRAAERLLQLCLNRRALK

SEQ ID NO: 866 - protein, 440 aa, synthetic construct
QTPKILMFPWLALGHVNPFLRIAKQLADRGFHIYLVSTAINLELAKKRIPEKYKDKITLVEYELPELPELPPHLHTTNGLPPHLNGTLDKALKMSAPRFDEIVKELQPDLVLYDFLIPWAEKIAEKHGVPGVPLFTVGAELFSTFFNFLKRPGHEFPFPAIRLSKREQDKMREMFGTEPTELDFLVPANAGIALLCTSEVIEAPYLEYCQKLTNVELVPVGAPFQDPLTEDIYDPELIAWLDTKPPGSVVYVSFGSEYFLSREQMHEVAEGLLESGVNFIWVARFPKGEEQPLEEVLPEGFLERIGDRGRVLDHLVPQAHILNHPATGGFISHCGWNSVMESIDFGVPIIAMPMQWDQPINARLLVELGVAVEIRRDEDGRIHREWIAETIREVIYGPTGETLRAQVAKIAAQLRAAREAEMDRAAERLLQLCLNRRALK

SEQ ID NO: 867 - protein, 440 aa, synthetic construct
QTPKILMFPWLALGHVNPFLRIAKQLADRGFHIYLVSTAINLELAKKRIPEKYKDKITLVEYELPELPELPPHLHTTNGLPPHLNGTLHKALKLSAPNFDKIVKELKPDLVLYDFLIPWAEDIAAKHGVPGVPLLTVGAALFSYFFNFLKRPGHEFPFPAIRLSKREQDKMREMFGTEPTELDFLVPANAGIMLMCTSPVIEAPYLEYCQKLTNVEVVPVGAPFQDPLTEDIYDPELIAWLDTKPPGSVVYVSFGSEYFLSREQMHEVAEGLLESGVNFIWVARFPKGEEQPLEEVLPEGFLERIGDRGRVLDHLVPQAHILNHPATGGFISHCGWNSVMESIDFGVPIIAMPMQWDQPINARLLVELGVAVEIRRDADGSIHREWIAETIREVIYGPTGETLRAQVAKIAAQLRARREAEMDVAAARLRELCLDRRALK

SEQ ID NO: 868 - protein, 440 aa, synthetic construct
QTPKILMFPWLALGHVNPFLRIAKQLADRGFTIYLVSTAINLELAKKRIPEKYKDKITLVEYELPELPELPPHLHTTNGLPPHLNGTLHEALKLSAPEFDRIVKELKPDLVLYDFLIPWAEGIAAKHGVPGVPLVTSGAALFSYFFNFLKRPGHEFPFPAIRLSKREQDKMREMFGTEPTELDFLVPANAGIMLMCTSDVIEAPYLEYCQKLTNVEVVPVGAPFQDPLTEDIYDPELIAWLDTKPPGSVVYVSFGSEYFLSREQMHEVAEGLLESGVNFIWVARFPKGEEQPLEEVLPEGFLERIGDRGRVLDHLVPQAHILNHPATGGFISHCGWNSVMESIDFGVPIIAMPMQWDQPINARLLVELGVAVEIRRDEDGSIHREWIAETIREVIYGPTGETLRAQVAKIAAQLRKTHEAEMDRAAERLRELCLKRRALK

SEQ ID NO: 869 - protein, 440 aa, synthetic construct
QMPKILMFPWLALGHVNPFLRIAKQLADRGFTIYLVSTAINLELAKKRIPEKYKDKITLVEYELPELPELPPHLHTTNGLPPHLNGTLHEALKKSAPNFDKIVKELKPDLVLYDFLIPWAEKIAEKYGVPGVPLSTVGAALFSYFFNFLKRPGHEFPFPAIRLSKREQDKMREMFGTEPTELDFLVPANAGIMLMCTSDVIEAPYLEYCQKLTNVEVVPVGAPFQDPLTEDIYDPELIAWLDTKPPGSVVYVSFGSEYFLSREQMHEVAEGLLESGVNFIWVARFPKGEEQPLEEVLPEGFLERIGDRGRVLDHLVPQAHILNHPATGGFISHCGWNSVMESIDFGVPIIAMPMQWDQPINARLLVEAGVAVEIRRDEDGSIHREWIAETIREVIYGPTGETLRAQVAKIAAALRAQREAEMDRAAERLLELCTDRRALK

SEQ ID NO: 870 - protein, 440 aa, synthetic construct
QKPKILMFPWLALGHVNPFLRIAKQLADRGFHIYLVSTAINLELAKKRIPEKYKDKITLVEYELPELPELPPHLHTTNGLPPHLNGTLHKALKMSAPTFDKIVKELDPDLVLYDFLIPWAEKIAEKHGVPGVPLLTTGAATWSYFFNFLKRPGHEFPFPAIRLSKREQDKMREMFGTEPTELDFLVPANAGIMLMCTSPVIEAPYLEYCQNLTNVEVVPVGAPFQDPLTEDIYDPELIAWLDTKPPGSVVYVSFGSEYFLSREQMHEVAEGLLESGVNFIWVARFPKGEEQPLEEVLPEGFLERIGDRGRVLDHLVPQAHILNHPATGGFISHCGWNSVMESIDFGVPIIAMPMQWDQPINARLLVEKGVAVEIRRDPDGSIHREWIAETIREVIYGPTGETLRAQVAKIAAELRKEREAEMDRAAERLLELCERRRALK

SEQ ID NO: 871 - protein, 440 aa, synthetic construct
QPPKILMFPWLALGHVNPFLRIAKQLADRGFHIYLVSTAINLELAKKRIPEKYKDKITLVEYELPELPELPPHLHTTNGLPPHLNGTLHEALKASAPTFERIVKELQPDLVLYDFLIPWAEKIAEKFGVPGVPLLTVGAALYSYFFNFLKRPGHEFPFPAIRLSKREQDKMREMFGTEPTELDFLVPANAGIMLMCTSPVIEAPYLEYCQKLTNVEVVPVGAPFQDPLTEDIYDPELIAWLDTKPPGSVVYVSFGSEYFLSREQMHEVAEGLLESGVNFIWVARFPKGEEQPLEEVLPEGFLERIGDRGRVLDHLVPQAHILNHPATGGFISHCGWNSVMESIDFGVPIIAMPMQWDQPINARLLVEMGVAVEIRRDEDGRIHREWIAETIREVIYGPTGETLRAQVAKIAAELRANREAEMDAAADRLRELCLNRRALK

SEQ ID NO: 872 - protein, 440 aa, synthetic construct
QSPKILMFPWLALGHVNPFLRIAKQLASRGFQIYLVSTAINLDLAKKRIPEKYKDKITLVEYELPELPELPPHLHTTNGLPPHLNGTLHKALKMSAPRFDEIVKELQPDLVLYDFLIPWAEKIAEKHGVPGVPLLTSGAALFSYFFNFLKRPGHEFPFPAIRLSKREQDKMREMFGTEPTELDFLVPANAGIMLMCTSEVIEAPYLEYCQKLTNVEVVPVGAPFQDPLTEDIYDPELLKWLDTKPPGSVVYVSFGSEYFLSREQMHEVALGLLESGVNFIWVARFPKGEEVPLEEVLPEGFLERIGDRGRVLDHLVPQEHILAHPATGGFISHCGWNSVMESIYFGVPIIAMPMQWDQPINARLLVELGVAVEIPRDEDGRINREWIAATIRDVIRGPTGETLRAQVKKIAEQLRASQEAEMDRAAERLLQLCLNRRALK

SEQ ID NO: 873 - protein, 440 aa, synthetic construct
HMPKILMFPWLALGHVNPFLRIAKQLADRGFHIYLVSTAINLELAKKRIPEKYKDKIKLVEYELPELPELPPHLHTTNGLPPHLNGTLHKALKMSAPRFDEIVKELQPDLVLYDFLIPWAEKIAEKHGVPGVPLLTSGAALFSYFFNFLKRPGHEFPFPAIRLSKREQDKMREMFGTEPTELDFLVPANAGIMLMCTSEVIEAPYLEYCQKLTNVEVVPVGAPFYDPGTEEIYDPELLAWLDTKPPGSVVYVSFGSEYFLSREQMHEVAEGLLESGVNFIWVARFPLGETQPLEEVLPEGFLERIGDRGRVLDHLVPQEHILAHPATGGFISHCGWNSVMESIDFGVPIIAMPMQWDQPINARLLVELGVAVEIRRDEDGSINREWIAETIRRVIYGPSGEALRAQVRKIADRLRAAREAEMDRAAERLLQLCLNRRALK

SEQ ID NO: 874 - protein, 412 aa, synthetic construct
QTPKILMFPWLALGHVNPFLRIAKQLADRGFHIYLVSTAINLELAKKRIPEKYKDKITLVEYELPELPELPPHLHTTNGLPPHLNGTLHKALKMSAPRFDEIVKELQPDLVLYDFLIPWAEKIAEKHGVPGVPLLTSGAALFSYFFNFLKGKELDFLVPANAGIMLMCTSEVIEAPYLEYCQKLTNVEVVPVGAPFQDPLTEDIYDPELIAWLDTKPPGSVVYVSFGSEYFLSREQMHEVAEGLLESGVNFIWVARFPKGEEQPLEEVLPEGFLERIGDRGRVLDHLVPQAHILNHPATGGFISHCGWNSVMESIDFGVPIIAMPMQWDQPINARLLVELGVAVEIRRDEDGRIHREWIAETIREVIYGPTGETLRAQVAKIAAQLRAAREAEMDRAAERLLQLCLNRRALK

SEQ ID NO: 875 - protein, 412 aa, synthetic construct
QTPKILMFPWLALGHVNPFLRIAKQLADRGFHIYLVSTAINLELAKKRIPEKYKDKITLVEYELPELPELPPHLHTTNGLPPHLNGTLHKALKMSAPRFDEIVKELQPDLVLYDFLIPWAEKIAEKHGVPGVPLLTSGAALFSYFFNFLKGPELDFLVPANAGIMLMCTSEVIEAPYLEYCQKLTNVEVVPVGAPFQDPLTEDIYDPELIAWLDTKPPGSVVYVSFGSEYFLSREQMHEVAEGLLESGVNFIWVARFPKGEEQPLEEVLPEGFLERIGDRGRVLDHLVPQAHILNHPATGGFISHCGWNSVMESIDFGVPIIAMPMQWDQPINARLLVELGVAVEIRRDEDGRIHREWIAETIREVIYGPTGETLRAQVAKIAAQLRAAREAEMDRAAERLLQLCLNRRALK

SEQ ID NO: 876 - protein, 413 aa, synthetic construct
QTPKILMFPWLALGHVNPFLRIAKQLADRGFHIYLVSTAINLELAKKRIPEKYKDKITLVEYELPELPELPPHLHTTNGLPPHLNGTLHKALKMSAPRFDEIVKELQPDLVLYDFLIPWAEKIAEKHGVPGVPLLTSGAALFSYFFNFLKGIKELDFLVPANAGIMLMCTSEVIEAPYLEYCQKLTNVEVVPVGAPFQDPLTEDIYDPELIAWLDTKPPGSVVYVSFGSEYFLSREQMHEVAEGLLESGVNFIWVARFPKGEEQPLEEVLPEGFLERIGDRGRVLDHLVPQAHILNHPATGGFISHCGWNSVMESIDFGVPIIAMPMQWDQPINARLLVELGVAVEIRRDEDGRIHREWIAETIREVIYGPTGETLRAQVAKIAAQLRAAREAEMDRAAERLLQLCLNRRALK

SEQ ID NO: 877 - protein, 413 aa, synthetic construct
QTPKILMFPWLALGHVNPFLRIAKQLADRGFHIYLVSTAINLELAKKRIPEKYKDKITLVEYELPELPELPPHLHTTNGLPPHLNGTLHKALKMSAPRFDEIVKELQPDLVLYDFLIPWAEKIAEKHGVPGVPLLTSGAALFSYFFNFLKGIPELDFLVPANAGIMLMCTSEVIEAPYLEYCQKLTNVEVVPVGAPFQDPLTEDIYDPELIAWLDTKPPGSVVYVSFGSEYFLSREQMHEVAEGLLESGVNFIWVARFPKGEEQPLEEVLPEGFLERIGDRGRVLDHLVPQAHILNHPATGGFISHCGWNSVMESIDFGVPIIAMPMQWDQPINARLLVELGVAVEIRRDEDGRIHREWIAETIREVIYGPTGETLRAQVAKIAAQLRAAREAEMDRAAERLLQLCLNRRALK

SEQ ID NO: 878 - protein, 414 aa, synthetic construct
QTPKILMFPWLALGHVNPFLRIAKQLADRGFHIYLVSTAINLELAKKRIPEKYKDKITLVEYELPELPELPPHLHTTNGLPPHLNGTLHKALKMSAPRFDEIVKELQPDLVLYDFLIPWAEKIAEKHGVPGVPLLTSGAALFSYFFNFLKGGKKELDFLVPANAGIMLMCTSEVIEAPYLEYCQKLTNVEVVPVGAPFQDPLTEDIYDPELIAWLDTKPPGSVVYVSFGSEYFLSREQMHEVAEGLLESGVNFIWVARFPKGEEQPLEEVLPEGFLERIGDRGRVLDHLVPQAHILNHPATGGFISHCGWNSVMESIDFGVPIIAMPMQWDQPINARLLVELGVAVEIRRDEDGRIHREWIAETIREVIYGPTGETLRAQVAKIAAQLRAAREAEMDRAAERLLQLCLNRRALK

SEQ ID NO: 879 - protein, 414 aa, synthetic construct
QTPKILMFPWLALGHVNPFLRIAKQLADRGFHIYLVSTAINLELAKKRIPEKYKDKITLVEYELPELPELPPHLHTTNGLPPHLNGTLHKALKMSAPRFDEIVKELQPDLVLYDFLIPWAEKIAEKHGVPGVPLLTSGAALFSYFFNFLKGGSKELDFLVPANAGIMLMCTSEVIEAPYLEYCQKLTNVEVVPVGAPFQDPLTEDIYDPELIAWLDTKPPGSVVYVSFGSEYFLSREQMHEVAEGLLESGVNFIWVARFPKGEEQPLEEVLPEGFLERIGDRGRVLDHLVPQAHILNHPATGGFISHCGWNSVMESIDFGVPIIAMPMQWDQPINARLLVELGVAVEIRRDEDGRIHREWIAETIREVIYGPTGETLRAQVAKIAAQLRAAREAEMDRAAERLLQLCLNRRALK

SEQ ID NO: 880 - protein, 11 aa, Solanum tuberosum
PWLAYGHISPF

SEQ ID NO: 881 - protein, 14 aa, Solanum tuberosum
TTNGLPPHLNHTLH

SEQ ID NO: 882 - protein, 4 aa, Solanum tuberosum
DILQ

SEQ ID NO: 883 - protein, 11 aa, synthetic construct
PWLALGHVNPF

SEQ ID NO: 884 - protein, 14 aa, synthetic construct
TTNGLPPHLNGTLH